(19) United States
(12) Patent Application Publication
(10) Pub. No.: US 2023/0355784 A1
(43) Pub. Date: Nov. 9, 2023

(54) COMPOUND FOR THE PREVENTION OR TREATMENT OF AUTOANTIBODY-MEDIATED CONDITIONS

(71) Applicant: ABLEVIA BIOTECH GMBH, Wien (AT)

(72) Inventors: Oskar SMRZKA, Wien (AT); Bettina WANKO, Wien (AT)

(21) Appl. No.: 18/246,110

(22) PCT Filed: Sep. 23, 2021
(86) PCT No.: PCT/EP2021/076176

§ 371 Date: Mar. 21, 2023

(30) Foreign Application Priority Data
Sep. 23, 2020 (EP) 20197934.1

(51) Int. Cl. A61K 47/64; A61K 47/68; C07K 14/705

(52) U.S. Cl. CPC A61K 47/643; A61K 47/6811; A61K 47/6835; C07K 14/70571

(57) ABSTRACT

A compound for the sequestration of undesirable antibodies associated with an autoantibody-mediated condition, such as Myalgic Encephalomyelitis/Chronic Fatigue Syndrome (ME/CFS), postural orthostatic tachycardia syndrome (POTS), Autoimmune Autonomic Ganglionopathy (AAG), Idiopathic Dilated Cardiomyopathy (IDC), Chronic Chagas heart disease (cChHD) and other neurological, neuromuscular and neuropsychiatric disorders, in particular, autoimmune channelopathies is provided. The compound includes a biopolymer scaffold and at least two peptides with a sequence length of 6-13 amino acid, wherein each of the peptides independently comprises a 6-amino-acid fragment of an amino-acid sequence of a human neuroreceptor, optionally wherein at most three amino acids are independently substituted by any other amino acid. Also provided are pharmaceutical compositions including the compound, as well as methods of ameliorating or treating the conditions mentioned above.

[0001] The field of present invention relates to the therapy of autoantibody-mediated conditions such as Myalgic Encephalomyelitis/Chronic Fatigue Syndrome (ME/CFS), postural orthostatic tachycardia syndrome (POTS), Autoimmune Autonomic Ganglionopathy (AAG), Idiopathic Dilated Cardiomyopathy (IDC), and Chronic Chagas heart disease (cChHD) and other neurological, neuromuscular and neuropsychiatric disorders.

[0002] Neuronal receptors represent a special class of targets for disease-causing autoantibodies in neurological autoimmune diseases. In the context with diseases that affect the peripheral autonomic nervous system, these autoepitopes have gained special attention in the context with a variety of neuroimmunological conditions. Comprehensive reviews about autoantibodies against structures of the neuromuscular junction, against peripheral and central neuroreceptors, and against receptors of the autonomic nervous system or against channel proteins, causing channel dysfunction called channelopathies with an autoimmune cause, were published (Vincent 2020; Golden et al, 2019 and Kim, 2014). Importantly, there is growing awareness about the pathogenic significance of this class of disease-causing antibodies against neuroreceptors in the periphery. At the same time, a rich spectrum of disease-associated autoantigens on neuronal surfaces and synapses of the central and the peripheral nerve system is emerging (Zong et al, 2017; Meyer et al, 2018).

[0003] Antibodies interfering with the autonomic nervous system are associated with many neuroimmunological conditions including e.g. autoimmune encephalitis, neurodegenerative diseases, multiple sclerosis but also paraneoplastic syndromes or even heart failure. Antibodies and autoantibodies can also target channel proteins (that is, cause channelopathies). Although there is still no complete functional and mechanistic understanding for the role of this type of autoantibodies, a growing body of evidence supports that their therapeutic removal is a useful and promising treatment strategy. Several different types of autoantibodies, typically against components of the autonomic nervous system, were shown to be associated with autonomic dysfunction (or Dysautonomia), which describes a general malfunction of autonomic functions. Dysautonomia is a complex and heterogeneous clinical picture involving several major organ systems such as the heart, intestines, bladder, brain, blood vessels, pupils, glands, and others (Thornton et al, 2017). It is also reviewed by Low & Engstrom, 2017.

[0004] Dysautonomia is also found in paraneoplastic syndromes with associated clinical conditions such as autoimmune autonomic ganglionopathy (Nakane et al, 2018), Lambert-Eaton myasthenic syndrome (Vincent 2020), limbic encephalitis or Morvan syndrome (Masood 2021), autonomic neuropathies, encephalitides, and various other manifestations of dysautonomias (reviewed by Golden et al, 2019 and Kaur et al, 2021). McKeon (McKeon et al, 2016) describes the role of autoantibodies and autoimmune autonomic disorders (including autoimmune autonomic ganglionopathy, paraneoplastic autonomic neuropathy, and acute autonomic and sensory neuropathy).

[0005] The focus of the present invention is mainly on a subgroup of dysautonomia-related conditions that are in particular associated with autoantibodies against the peripheral autonomic nervous system.

[0006] One of the most relevant diseases that involve the peripheral autonomic nervous system is the Chronic fatigue syndrome/Myalgic encephalopathy (CFS/ME, also designated “ME/CFS”); see Sotzny et al, 2018, or Cortes Rivera et al, 2019.

[0007] ME/CFS is a complex multisystemic condition where patients typically lose the ability to follow their daily activities because of severe fatigue, sleeping problem and stress intolerance, which has strong impact on their social life and their professional activity. Excessive exhaustibility and severe fatigue are typically combined with cognitive impairment and many other symptoms. It is thought that immunological, genetic, and infectious factors might contribute to a multicausal pathogenesis. To date, neither standardized diagnostics, nor well validated biomarkers, nor appropriate therapies or medications exist. The treatment of ME/CFS is essentially limited to symptomatic therapies. Numerous studies support that autoantibodies against the autonomic nervous system may play a causative role in ME/CFS (reviewed by Sotzny et al, 2018). Remarkably, general removal of antibodies by extracorporeal immunoapheresis could also deplete anti-neuroreceptor antibodies and this could be correlated with clinical improvement of the condition (Scheibenbogen et al, 2018). The association between clinical symptoms and the presence of anti-adrenergic and anti-cholinergic autoantibodies in ME/CFS patients was further corroborated by Bynke et al, 2020.

[0008] Importantly, the postural orthostatic tachycardia syndrome (POTS) is a related condition [Zhao et al, 2020, Ruzieh et al, 2017]. As ME/CFS, it is associated, among others, with anti-adrenergic- and muscarinic receptor autoantibodies (Gunning et al, 2019). POTS typically manifests with chronic orthostatic intolerance and a variety of other co-morbidities. The hallmark is typically a strong increase of the heart rate upon standing, often combined with blurred vision, mental clouding, chest discomfort and other heterogenous autonomic abnormalities (see f. ex. Jacob et al, 2020, and citations therein). Mechanistic evidence for the causative role of autoantibodies against neuroreceptors of the autonomic nervous system was provided by in vitro functional blocking of the M3 AChR with patient serum containing autoantibodies against the receptor protein [Palma et al, 2020]. Other examples of a causative role for this type of anti-neuronal autoantibodies were also found in chronic heart failure (Nagatomo et al, 2014).

[0009] Complex Regional Pain Syndrome (CRPS) is a pain condition after injury or surgery to a limb and associated with autoantibodies against autonomous neuroreceptors. Again, anti-GPCR antibodies were also functionally assigned to autonomic dysfunction in the autoimmune disease Sjogren's syndrome (reviewed in Shoenfeld et al, 2020). The role of autoantibodies in autoimmune autonomic ganglionopathy was described (Nakane et al, 2018).

[0010] Evidence that Ganglionic Acetylcholine Receptor Antibodies play a role in several rheumatic autoimmune diseases (including Sjögren's syndrome, systemic sclerosis, rheumatoid arthritis, and systemic lupus erythematosus) was published (Imamura et al, 2020).

[0011] Idiopathic dilated cardiomyopathy (IDC) is typically regarded as a primary myocardial disease characterized by left ventricular or biventricular dilatation and impaired myocardial contractility. Wallukat and Müller (Wallukat et al, 2002; Müller et al, 2000) provided clinical evidence, whereby autoantibodies against beta-1 adrenergic receptor could be non-selectively removed in patients with IDC. Schimke et al, 2005, showed immunoadsorption of anti-beta-1 adrenoreceptor autoantibodies by immunoapheresis in patients with IDC, leading to a reduction in oxidative stress and an improvement in cardiac performance. Matsui et al., 1997, showed that peptides derived from G-protein-coupled receptors can induce morphological cardiomyopathic changes in immunized rabbits. Bornholz et al., 2014, provide a discussion of using beta-1 adrenergic autoantibodies for diagnostic and biomarker purpose.

[0012] Chronic Chagas heart disease (cChHD) typically is a chronic manifestation of the Trypanosoma cruzi infection, usually characterized by high antibody levels against the C-terminal region of the ribosomal P proteins. Labovsky et al., 2007, showed autoantibodies against beta-1-adrenergic receptor in patients with cChHD.

[0013] Düngen et al., 2020 provide an overview of the relation of beta-1 adrenoreceptor autoantibodies with heart disease.

[0014] The pathogenic role for these autoantibodies is supported by results from B-cell depletion or other immunosuppressive therapies including immunoapheresis, where clinical improvement in ME/CFS patients could be observed (Scheibenbogen et al, 2018; Kim et al, 2020). Furthermore, plasma exchange therapy was performed in POTS (Wells et al, 2020), and several Ig depleting approaches, including IVIG therapy, plasma exchange and rituximab treatment supported a causative role for the autoantibodies in these diseases.

[0015] However, general immunosuppression or non-selective antibody depletion e.g. by B-cell depletion or immunoapheresis is inconvenient and stressful, and associated with a multitude of undesired side-effects and high cost

[0016] It is thus an object of the present invention to provide compounds and methods for the therapy of autoantibody-mediated conditions, preferably selected from ME/CFS, POTS, AAG, IDC, and cChHD, which address one or more of the shortcomings of existing therapies described above and/or which lead to improved treatment outcome.

[0017] The present invention provides a compound (typically for the sequestration, or depletion, of antibodies, in particular antibodies associated with autoantibody-mediated conditions, preferably selected from ME/CFS, POTS, AAG, IDC, and cChHD or other conditions mentioned herein, present in a human individual) comprising a biopolymer scaffold and at least two peptides with a sequence length of 6-13 amino acids, wherein each of the peptides independently comprises a 6-amino-acid fragment, preferably a 7-, more preferably an 8-, even more preferably a 9-, even more preferably a 10-, even more preferably an 11-, yet even more preferably a 12-, most preferably a 13-amino-acid fragment, of an amino-acid sequence (preferably of a (preferably human) neuroreceptor), identified by a UniProt accession code selected from the group consisting of:

[0018] P02708, P07510, P07550, P08172, P08173, P08588, P08908, P08912, P08913, P11229, P11230, P13945, P17787, P18089, P18825, P20309, P25098, P25100, P30532, P30926, P32297, P35348, P35368, P35626, P36544, P43681, Q04844, Q05901, Q07001, Q15822, Q15825, Q9GZZ6, Q9UGM1, A0A0G2JKS1, A5X5Y0, A6NL88, A8MPY1, B4DS77, B8ZZ34, O00222, O00591, O14490, O14764, O15303, O15399, O43424, 043653, O60359, O60391, O60403, O60404, O60936, O75311, O75916, 076027, O94772, O95264, O95502, O95868, O95886, P01579, P05026, P05067, P06850, P07196, P07384, POC7T3, POC8F1, PODP57, PODP58, P12931, P13500, P14416, P14867, P15382, P16066, P17342, P18505, P18507, P19634, P20594, P21452, P21728, P21917, P21918, P23415, P23416, P24046, P24387, P25021, P25101, P28221, P28222, P28223, P28335, P28472, P28476, P28566, P29274, P29275, P29323, P30411, P30542, P30556, P30939, P31644, P32418, P34903, P34969, P35367, P35372, P35462, P35609, P37288, P39086, P41594, P41595, P41597, P42261, P42262, P42263, P43119, P46098, P47869, P47870, P47898, P47901, P47972, P48058, P48067, P48167, P48169, P48549, P49354, P50052, P50406, P53355, P55000, P62955, P63252, P78334, P78352, P78509, Q00535, Q05586, Q06413, Q07699, Q12879, Q12959, Q13002, Q13003, Q13224, Q13255, Q13387, Q13639, Q13702, Q13936, Q13972, Q14289, Q14416, Q14500, Q14571, Q14573, Q14643, Q14831, Q14832, Q14833, Q14957, Q15700, Q15818, Q16099, Q16445, Q16478, Q16553, Q16602, Q401N2, Q494W8, Q5SQ64, Q6PI25, Q6TFL4, Q6UXU4, Q6ZSJ9, Q70Z44, Q86Y78, Q86YM7, Q8N1C3, Q8N2G4, Q8N2Q7, Q8N4C8, Q8NC67, Q8NFZ4, Q8NG75, Q8NGA5, Q8NGA6, Q8NGC8, Q8NGC9, Q8NGG2, Q8NGG3, Q8NGH5, Q8NGH8, Q8NGN1, Q8NGS4, Q8NGY7, Q8NHC4, Q8NI32, Q8TBE1, Q8TCU5, Q8TDF5, Q8WXA2, Q8WXA8, Q8WXS5, Q92736, Q92796, Q96G91, Q96NW7, Q96P66, Q99928, Q99996, Q9BUH8, Q9BXM7, Q9BYB0, Q9GZV3, Q9H3N8, Q9NPA1, Q9NZ94, Q9P1A6, Q9UBK2, Q9UBN1, Q9UBS5, Q9UF02, Q9ULKO, Q9UN88, Q9UPX8, Q9Y2H0, Q9Y4A9, Q9Y566, Q9Y5N1, Q9Y691, Q9Y698, P37088, P51168, P51170, P51172, O94759, Q16515, O60741, Q9NZQ8, P78348, Q8TDD5, Q9NY37, Q13002, P39086, P48664, A6NGN9, 000305, O00555, O15146, O43448, O43497, O43525, O43526, O60840, 075096, O95180, O95259, O95970, P06213, P16389, P16473, P17658, P22001, P22459, P22460, P24530, P42658, P43146, P48547, P49418, P51787, P54284, P54289, P56696, Q00975, Q01668, Q02246, Q02641, Q03721, Q05329, Q06432, Q08289, Q09470, Q12809, Q13018, Q13303, Q13698, Q14003, Q14721, Q14722, Q15878, Q6PIL6, Q6PIU1, Q6X4W1, Q7Z3S7, Q7Z429, Q8IZS8, Q8NCM2, Q8TAE7, Q8TDN1, Q8TDN2, Q8WWG9, Q92953, Q96KK3, Q96L42, Q96PR1, Q96RP8, Q9BQ31, Q9BXT2, Q9H252, Q9H3M0, Q9NR82, Q9NS40, Q9NS61, Q9NSA2, Q9NY47, Q9NZI2, Q9NZV8, Q9POX4, Q9UHC6, Q9UIX4, Q9UJ90, Q9UJ96, Q9UK17, Q9ULD8, Q9ULS6, Q9UQ05, Q9Y2W7, Q9Y6H6, Q9Y6J6, P48058, P55087, Q9BPU6, P52799, P15328, Q05329, Q16653, Q9Y4C0, Q5F0I5, Q99719, P17600, Q13148, P01266, P07202, and Q9Y6A1, (preferably identified by an UniProt accession code selected from Table 1, Table 2 or Table 3 below, in particular Table 1 or Table 3), optionally wherein at most three, preferably at most two, more preferably at most one amino acid is independently substituted by any other amino acid.

[0019] Furthermore, the present invention provides a pharmaceutical composition comprising the compound according to the invention and at least one pharmaceutically acceptable excipient.

[0020] In an aspect, this pharmaceutical composition is for use in prevention or treatment of autoantibody-mediated conditions, preferably selected from ME/CFS, POTS, AAG, IDC, cChHD, encephalitis such as limbic encephalitis or paraneoplastic striatal encephalitis or Anti-mGluR1 encephalitis or Anti-mGluR5 encephalitis or acute disseminated encephalomyelitis (ADEM) or NMDAR encephalitis, paraneoplastic syndrome, stiff man syndrome, autoimmune channelopathies, neuromyelitis optica, neuromyotonia, Morvan's syndrome, neuropathic pain, myelitis, optic neuritis, retinitis, parkinsonism, chorea, psychosis, dystonia, mutism, movement disorders, confusion, hallucinations, prodromal diarrhoea, memory loss, hyperexcitability, encephalitis psychiatric syndrome, narcolepsy, autism spectrum disorders, seizures, status epilepticus, chronic epilepsy, myoclonus, encephalomyelitis, myoclonus, parasomnia, sleep apnoea, cognitive impairment, gait abnormalities, faciobrachial dystonic seizures, paraneoplastic syndrome, cerebellar ataxia, dysautonomia, Tourette, ADHD, cerebellar ataxia, oscillopsia, amyotrophic lateral sclerosis (ALS), thyroid disorder and headache with neurological deficits and lymphocytosis (HaNDL), in an individual, preferably a human individual.

[0021] As described herein above, there are numerous studies supporting that autoantibodies against neuroreceptors or membrane channel proteins play a causative role in ME/CFS, POTS, AAG, IDC, and cChHD. For instance, Bynke et al. found that there exists a general pattern of increased antibody levels to adrenergic and muscarinic receptors in ME/CFS patients (Bynke et al., 2020). In particular, significant increases in autoantibody levels directed against beta-1 and beta-2 adrenergic receptors as well as M3 and M4 muscarinic acetylcholine receptors were observed. Scheibenbogen et al. also observed elevated autoantibodies, in particular against beta-2 adrenergic receptors, and M3 and M4 muscarinic acetylcholine receptors in ME/CFS patients (Scheibenbogen et al., 2020). General antibody depletion by immunoadsorption was shown to be effective in removing autoantibodies and lead to clinical improvement in ME/CFS patients.

[0022] However, prior to the present invention, there were no selective approaches to specifically target disease-causing antibodies. Non-specific antibody depletion or immunosuppression are highly inconvenient and come with a multitude of undesired side effects.

[0023] In the course of the present invention, a compound was developed which is able to deplete (or sequester) such antibodies against neuroreceptors in vivo and is therefore suitable for use in the prevention or treatment of autoantibody-mediated conditions, such as ME/CFS, POTS, AAG, IDC, and cChHD and other conditions mentioned herein.

[0024] Further, it was surprisingly found that the approach which is also used in the invention is particularly effective in reducing titres of undesired antibodies in an individual. In particular, the compound achieved especially good results with regard to selectivity, duration of titre reduction and/or level of titre reduction in an in vivo model (see experimental examples). Moreover it was found that the approach allowed antibody sequestration within less than 24 hours.

[0025] The detailed description given below relates to all of the above aspects of the invention unless explicitly excluded.

[0026] In general, antibodies are essential components of the humoral immune system, offering protection from infections by foreign organisms including bacteria, viruses, fungi or parasites. However, under certain circumstances—including autoimmune diseases, organ transplantation, blood transfusion or upon administration of biomolecular drugs or gene delivery vectors—antibodies can target the patient's own body (or the foreign tissue or cells or the biomolecular drug or vector just administered), thereby turning into harmful or disease-causing entities. Certain antibodies can also interfere with probes for diagnostic imaging. In the following, such antibodies are generally referred to as “undesired antibodies” or “undesirable antibodies”.

[0027] With few exceptions, selective removal of undesired antibodies has not reached clinical practice. It is presently restricted to very few indications: One of the known techniques for selective antibody removal (although not widely established) is immunoapheresis. In contrast to immunoapheresis (which removes immunoglobulin), selective immunoapheresis involves the filtration of plasma through an extracorporeal, selective antibody-adsorber cartridge that will deplete the undesired antibody based on selective binding to its antigen binding site. Selective immunoapheresis has for instance been used for removing anti-A or anti-B antibodies from the blood prior to ABO-incompatible transplantation or with respect to indications in transfusion medicine (Teschner et al). Selective apheresis was also experimentally applied in other indications, such as neuroimmunological indications (Tetala et al) or myasthenia gravis (Lazaridis et al), but is not yet established in the clinical routine. One reason that selective immunoapheresis is only hesitantly applied is the fact that it is a cost intensive and cumbersome intervention procedure that requires specialized medical care. Moreover, it is not known in the prior art how to deplete undesired antibodies rapidly and efficiently.

[0028] Unrelated to apheresis, Morimoto et al. discloses dextran as a generally applicable multivalent scaffold for improving immunoglobulin-binding affinities of peptide and peptidomimetic ligands such as the FLAG peptide. WO 2011/130324 A1 relates to compounds for prevention of cell injury. EP 3 059 244 A1 relates to a C-met protein agonist.

[0029] As mentioned, apheresis is applied extracorporeally. By contrast, also several approaches to deplete undesirable antibodies intracorporeally were proposed in the prior art, mostly in connection with certain autoimmune diseases involving autoantibodies or anti-drug antibodies:

[0030] Lorentz et al discloses a technique whereby erythrocytes are charged in situ with a tolerogenic payload driving the deletion of antigen-specific T cells. This is supposed to ultimately lead to reduction of the undesired humoral response against a model antigen. A similar approach is proposed in Pishesha et al. In this approach, erythrocytes are loaded ex vivo with a peptide-antigen construct that is covalently bound to the surface and reinjected into the animal model for general immunotolerance induction.

[0031] WO 92/13558 A1 relates to conjugates of stable nonimmunogenic polymers and analogs of immunogens that possess the specific B cell binding ability of the immunogen and which, when introduced into individuals, induce humoral anergy to the immunogen. Accordingly, these conjugates are disclosed to be useful for treating antibody-mediated pathologies that are caused by foreign- or self-immunogens. In this connection, see also EP 0 498 658 A2.

[0032] Taddeo et al discloses selectively depleting antibody producing plasma cells using anti-CD138 antibody derivatives fused to an ovalbumin model antigen thereby inducing receptor crosslinking and cell suicide in vitro selectively in those cells that express the antibody against the model antigen.

[0033] Apitope International NV (Belgium) is presently developing soluble tolerogenic T-cell epitope peptides which may lead to expression of low levels of co-stimulatory molecules from antigen presenting cells inducing tolerance, thereby suppressing antibody response (see e.g. Jansson et al). These products are currently under preclinical and early clinical evaluation, e.g. in multiple sclerosis, Grave's disease, intermediate uveitis, and other autoimmune conditions as well as Factor VIII intolerance.

[0034] Similarly, Selecta Biosciences, Inc. (USA) is currently pursuing strategies of tolerance induction by so-called Synthetic Vaccine Particles (SVPs). SVP-Rapamycin is supposed to induce tolerance by preventing undesired antibody production via selectively inducing regulatory T cells (see Mazor et al).

[0035] Mingozzi et al discloses decoy adeno-associated virus (AAV) capsids that adsorb antibodies but cannot enter a target cell.

[0036] WO 2015/136027 A1 discloses carbohydrate ligands presenting the minimal Human Natural Killer-1 (HNK-1) epitope that bind to anti-MAG (myelin-associated glycoprotein) IgM antibodies, and their use in diagnosis as well as for the treatment of anti-MAG neuropathy. WO 2017/046172 A1 discloses further carbohydrate ligands and moieties, respectively, mimicking glycoepitopes comprised by glycosphingolipids of the nervous system which are bound by anti-glycan antibodies associated with neurological diseases. The document further relates to the use of these carbohydrate ligands/moieties in diagnosis as well as for the treatment of neurological diseases associated with anti-glycan antibodies.

[0037] US 2004/0258683 A1 discloses methods for treating systemic lupus erythematosus (SLE) including renal SLE and methods of reducing risk of renal flare in individuals with SLE, and methods of monitoring such treatment. One disclosed method of treating SLE including renal SLE and reducing risk of renal flare in an individual with SLE involves the administration of an effective amount of an agent for reducing the level of anti-double-stranded DNA (dsDNA) antibody, such as a dsDNA epitope as in the form of an epitope-presenting carrier or an epitope-presenting valency platform molecule, to the individual.

[0038] U.S. Pat. No. 5,637,454 relates to assays and treatments of autoimmune diseases. Agents used for treatment might include peptides homologous to the identified antigenic, molecular mimicry sequences. It is disclosed that these peptides could be delivered to a patient in order to decrease the amount of circulating antibody with a particular specificity.

[0039] US 2007/0026396 A1 relates to peptides directed against antibodies, which cause cold-intolerance, and the use thereof. It is taught that by using the disclosed peptides, in vivo or ex vivo neutralization of undesired autoantibodies is possible. A comparable approach is disclosed in WO 1992/014150 A1 or in WO 1998/030586 A2.

[0040] WO 2018/102668 A1 discloses a fusion protein for selective degradation of disease-causing or otherwise undesired antibodies. The fusion protein (termed “Seldeg”) includes a targeting component that specifically binds to a cell surface receptor or other cell surface molecule at near-neutral pH, and an antigen component fused directly or indirectly to the targeting component. Also disclosed is a method of depleting a target antigen-specific antibody from a patient by administering to the patient a Seldeg having an antigen component configured to specifically bind the target antigen-specific antibody.

[0041] WO 2015/181393 A1 concerns peptides grafted into sunflower-trypsin-inhibitor-(SFTI-) and cyclotide-based scaffolds. These peptides are disclosed to be effective in autoimmune disease, for instance citrullinated fibrinogen sequences that are grafted into the SFTI scaffold have been shown to block autoantibodies in rheumatoid arthritis and inhibit inflammation and pain. These scaffolds are disclosed to be non-immunogenic.

[0042] Erlandsson et al discloses in vivo clearing of idiotypic antibodies with anti-idiotypic antibodies and their derivatives.

[0043] Berlin Cures Holding AG (Germany) has proposed an intravenous broad spectrum neutralizer DNA aptamer (see e.g. WO 2016/020377 A1 and WO 2012/000889 A1) for the treatment of dilated cardiomyopathy and other GPCR-autoantibody related diseases that in high dosage is supposed to block autoantibodies by competitive binding to the antigen binding regions of autoantibodies. In general, aptamers did not yet achieve a breakthrough and are still in a preliminary stage of clinical development. The major concerns are still biostability and bioavailability, constraints such as nuclease sensitivity, toxicity, small size and renal clearance. A particular problem with respect to their use as selective antibody antagonists are their propensity to stimulate the innate immune response.

[0044] WO 00/33887 A2 discloses methods for reducing circulating levels of antibodies, particularly disease-associated antibodies. The methods entail administering effective amounts of epitope-presenting carriers to an individual. In addition, ex vivo methods for reducing circulating levels of antibodies are disclosed which employ epitope-presenting carriers.

[0045] U.S. Pat. No. 6,022,544 A relates to a method for reducing an undesired antibody response in a mammal by administering to the mammal a non-immunogenic construct which is free of high molecular weight immunostimulatory molecules. The construct is disclosed to contain at least two copies of a B cell membrane immunoglobulin receptor epitope bound to a pharmaceutically acceptable non-immunogenic carrier.

[0046] However, the approaches to deplete undesirable antibodies intracorporeally disclosed in the prior art have many shortcomings. In particular, neither of them has been approved for regular clinical use.

[0047] With respect to the compound of the present invention, it is preferred that said neurotransmitter is a neuroreceptor of the autonomic nervous system, more preferably a neuroreceptor selected from the group consisting of muscarinic, and nicotinic cholinergic receptors, alpha- and beta-adrenergic receptors, serotonin receptors, angiotensin- and endothelin receptors; most preferably a neuroreceptor selected from the group consisting of beta-1 adrenergic receptor, beta-2 adrenergic receptor, M3 muscarinic acetylcholine receptor, and M4 muscarinic acetylcholine receptor. In all instances, it is preferred that the neuroreceptor is a human neuroreceptor.

[0048] In a preference, each of the at least two peptides (comprised by the inventive compound), independently comprises a 6-, 7-, 8-, 9-, 10-, 11-, 12-, 13-amino acid fragment (in increasing order of preference) of an amino acid sequence (preferably of a neuroreceptor of the autonomic nervous system) identified by a UniProt accession code selected from the group consisting of: P02708, P07510, P07550, P08172, P08173, P08588, P08908, P08912, P08913, P11229, P11230, P13945, P17787, P18089, P18825, P20309, P25098, P25100, P30532, P30926, P32297, P35348, P35368, P35626, P36544, P43681, Q04844, Q05901, Q07001, Q15822, Q15825, Q9GZZ6, Q9UGM1; P37088, P51168, P51170, P51172, 094759, Q16515, 060741, Q9NZQ8, P78348, Q8TDD5, Q9NY37, Q13002, P39086, and P48664.

[0049] It is even more preferred, if said amino acid sequence is an amino acid sequence of a neuroreceptor selected from the group consisting of muscarinic, and nicotinic cholinergic receptors, alpha- and beta-adrenergic receptors, serotonin receptors, angiotensin- and endothelin receptors.

[0050] In a particular preference, said amino acid sequence is an amino acid sequence (preferably of a neuroreceptor selected from the group consisting of beta-1 adrenergic receptor, beta-2 adrenergic receptor, M3 muscarinic acetylcholine receptor, and M4 muscarinic acetylcholine receptor) identified by a UniProt accession code selected from the group consisting of: P08588, P07550, P20309, and P08173.

[0051] The definitions of preferred amino acid sequences (with respect to neurotransmitters and/or UniProt accession numbers) disclosed in the preceding paragraphs, as well as in the summary of the invention disclosed herein above, equally apply as preferred embodiments to all definitions of peptides comprised in the inventive compound (designated herein below e.g. as P, P₁, P₂, Pa-J).

[0052] It is well established that many neurological, neuromuscular and neuropsychiatric disorders are associated with or caused by autoantibodies. Since the discovery of the disease-causing effect of autoantibodies that target the neuromuscular junction (e.g. antibodies to the nicotinic acetylcholine receptor in myasthenia gravis), several paradigms with similar pathogenetic features were described. In many cases correlations and associations were shown in the clinic, for some of these cases functional proof of concepts was established by using animal models in which the pathogenic effects of human autoantibodies (either from autoimmune sera, or from cloned antibodies, or directly induced by active immunization) were demonstrated, as reviewed for example by Giannoccaro et al., 2020. In the course of the present invention, sera from human donors (including ME/CFS patients) were screened for peptides that are able to bind to the paratopes of autoantibodies against human proteins, in particular receptors and ion channels or other membrane channels, involved in neurological, neuromuscular and neuropsychiatric disorders (see in particular Example 12 and Table 1 below, as well as e.g. Table 2). The found peptides or fragments thereof are suitable to deplete disease-causing autoantibodies in a patient when administered in the form of the inventive compound.

[0053] Several neurological or neuropsychiatric disease conditions or syndromes can be associated with one or several common autoantibody targets (i.e. autoantigens). Autoantigens do not necessarily need to be located in the extracellular space, such as is the case with neuroreceptors and membrane channels (related to autoimmune channelopathies)—many autoantibodies are in fact associated with intracellular antigens, as listed below. Importantly, the association of neuroimmunological symptoms is found in a variety of conditions such as tumors, neurodegenerative diseases or autoimmune diseases. The present invention provides a solution of removing such autoantibodies regardless of whether the corresponding autoantigens are located in the extracellular or intracellular space. The peptides derived from neuroreceptors and other proteins disclosed herein provide binding moieties for autoantibodies regardless of whether the peptides have been derived from an extra- or intracellular portion of a protein chain. Furthermore, the peptide identification strategy provided in the present invention may yield peptide hits which only represent a partial epitope structure, and not an entire, “natural” epitope structure—it is not required that the linear or cyclic peptides of the present invention should mimic an entire epitope per se (in fact, representing only a partial epitope is preferred in order to further reduce any potential immunogenicity of the compounds of the present invention). In other words, a purpose of the peptides of the present invention is to bind to undesired and disease-causing antibodies such as the type of autoantibodies involved in neurological or neuropsychiatric diseases (see in particular Tables 1-3 below).

TABLE 1
Results of a microarray screen for peptides which bind
autoantibodies present in sera from human donors (including
ME/CFS patients). The peptides were based on human proteins, the
respective protein on which a peptide is based on is identified
with its UniProt accession number.

| peptide # | SEQ ID NO | peptide | group I | group II | group III | protein (UniProt) |
|---|---|---|---|---|---|---|
| 1 | 45 | GQPGAQRMYKQ | X | X | X | O00555 |
| 2 | 46 | HLPDDDKTPMS | X | X | X | O00555 |
| 3 | 47 | PGAQRMYKQSM | X | X | X | O00555 |
| 4 | 48 | PPLNHTVVQVN | X | X | X | O00555 |
| 5 | 49 | QILTGEDWNEV | X | X | X | O00555 |
| 6 | 50 | RSHRASERSLG | X | X | X | O00555 |
| 7 | 51 | SSPAPLGGQET | X | X | X | O43497 |
| 8 | 52 | EKKRRNLMLDDVIA | X | X | X | O43497 |
| 9 | 53 | LNCITIAMERPKID | X | X | X | O43497 |
| 10 | 54 | RRLEKKRRNLMLDD | X | X | X | O43497 |
| 11 | 55 | CNYSETGPPEPPYS | X | X | X | O43525 |
| 12 | 56 | LSSFLVYLVEKDVP | X | X | X | O43525 |
| 13 | 57 | VVVEGSGRVADVIA | X | X | X | O94759 |
| 14 | 58 | ASAGGAKILGVLRV | X | X | X | O95180 |
| 15 | 59 | ELGADEEQRVPYPA | X | X | X | O95180 |
| 16 | 60 | SGDPPLGDQKP | X | X | X | O95180 |
| 17 | 61 | FEPLDLGVPSGDPF | X | X | X | O95180 |
| 18 | 62 | LINVDEVNQIVTTN | X | X | X | P02708 |
| 19 | 63 | SLRSPHTHSMA | X | X | X | P07510 |
| 20 | 64 | GRTGHGLRRSS | X | X | X | P07550 |
| 21 | 65 | LGPVVCDLWLALDY | X | X | X | P08172 |
| 22 | 66 | VSPSLVQGRIVKPN | X | X | X | P08172 |
| 23 | 67 | YWPLGPVVCDLWLA | X | X | X | P08172 |
| 24 | 68 | IKVNRQLQTVN | X | X | X | P08173 |
| 25 | 69 | DPKCCDFVTNR | X | X | X | P08588 |
| 26 | 70 | KCCDFVTNRAY | X | X | X | P08588 |
| 27 | 71 | MSLASADLVMG | X | X | X | P08588 |
| 28 | 72 | EFSAEETEETF | X | X | X | P08912 |
| 29 | 73 | PGEEFSAEETEETF | X | X | X | P08912 |
| 30 | 74 | SPGEEFSAEETEET | X | X | X | P08912 |
| 31 | 75 | EETEETF | X | X | X | P08912 |
| 32 | 76 | PGEEFSAEETEET | X | X | X | P08912 |
| 33 | 77 | NLYTTYL | X | X | X | P11229 |
| 34 | 78 | EKLFSGY | X | X | X | P11230 |
| 35 | 79 | FYLPLLVMLFV | X | X | X | P13945 |
| 36 | 80 | HSKGLQILGQTLKA | X | X | X | P16389 |
| 37 | 81 | QVWLLFEYPESSGP | X | X | X | P16389 |
| 38 | 82 | VLITSLAILVF | X | X | X | P17787 |
| 39 | 83 | AKLPALASVASARE | X | X | X | P18089 |
| 40 | 84 | ALPNSGQGQKE | X | X | X | P18089 |
| 41 | 85 | WAALPNSGQGQKEG | X | X | X | P18089 |
| 42 | 86 | ALPNSGQGQKEGV | X | X | X | P18089 |
| 43 | 87 | GQGQKEG | X | X | X | P18089 |
| 44 | 88 | AVTGVNKIELPQFS | X | X | X | P18505 |
| 45 | 89 | ATLVMPFSLANELM | X | X | X | P18825 |
| 46 | 90 | VMPFSLANELMAYW | X | X | X | P18825 |
| 47 | 91 | CNKTFRTTFKM | X | X | X | P20309 |
| 48 | 92 | SSDSWNNNDAA | X | X | X | P20309 |
| 49 | 93 | APQSLLTMEEI | X | X | X | P25098 |
| 50 | 94 | GEAPQSLLTME | X | X | X | P25098 |
| 51 | 95 | TISERWQQEVA | X | X | X | P25098 |
| 52 | 96 | APQSLLTMEEIQS | X | X | X | P25098 |
| 53 | 97 | EGEAPQSLLTMEE | X | X | X | P25098 |
| 54 | 98 | GEAPQSLLTMEEI | X | X | X | P25098 |
| 55 | 99 | PQSLLTMEEIQSV | X | X | X | P25098 |
| 56 | 100 | QSLLTMEEIQSVE | X | X | X | P25098 |
| 57 | 101 | SLLTMEEIQSVEE | X | X | X | P25098 |
| 58 | 102 | GVGVFLAAFILMA | X | X | X | P25100 |
| 59 | 103 | LLRCQCRRRRRRR | X | X | X | P25100 |
| 60 | 104 | VGVRHSL | X | X | X | P25100 |
| 61 | 105 | YTIMTAHFHLKRKI | X | X | X | P31644 |
| 62 | 106 | GSARITVSKDQ | X | X | X | P35348 |
| 63 | 107 | GMASAKTKTHFSV | X | X | X | P35348 |
| 64 | 108 | LKSGLKTDKSDSE | X | X | X | P35348 |
| 65 | 109 | CRGRGRRRRRRRRR | X | X | X | P35368 |
| 66 | 110 | CQCRGRGRRRRRR | X | X | X | P35368 |
| 67 | 111 | CRGRGRRRRRRRR | X | X | X | P35368 |
| 68 | 112 | GRGRRRRRRRRRL | X | X | X | P35368 |
| 69 | 113 | QCRGRGRRRRRRR | X | X | X | P35368 |
| 70 | 114 | RGRGRRRRRRRRR | X | X | X | P35368 |
| 71 | 115 | RGRRRRRRRRRLG | X | X | X | P35368 |
| 72 | 116 | CTPCKENEYVFDEY | X | X | X | P41594 |
| 73 | 117 | NTQNFKPAPATNTQ | X | X | X | P42263 |
| 74 | 118 | TTRSITDPTDPVDY | X | X | X | P43146 |
| 75 | 119 | DQLDFWESGEW | X | X | X | P43681 |
| 76 | 120 | ELPPPDQPSPC | X | X | X | P43681 |
| 77 | 121 | PPPDQPSPCKC | X | X | X | P43681 |
| 78 | 122 | SVKEDWKYVAMVID | X | X | X | P43681 |
| 79 | 123 | AELPPPDQPSPCK | X | X | X | P43681 |
| 80 | 124 | HSAELPPPDQPSP | X | X | X | P43681 |
| 81 | 125 | PDQPSPC | X | X | X | P43681 |
| 82 | 126 | PPDQPSP | X | X | X | P43681 |
| 83 | 127 | SAELPPPDQPSPC | X | X | X | P43681 |
| 84 | 128 | LPSTCLQKVEEQPE | X | X | X | Q00975 |
| 85 | 129 | SAKPLTRYMPQ | X | X | X | Q00975 |
| 86 | 130 | IVLALEQHLPDGDK | X | X | X | Q00975 |
| 87 | 131 | AMDILNMVFTGVFT | X | X | X | Q01668 |
| 88 | 132 | KAAQTMSTSAP | X | X | X | Q01668 |
| 89 | 133 | KHDREPQRRSS | X | X | X | Q01668 |
| 90 | 134 | QAKAAQTMSTS | X | X | X | Q01668 |
| 91 | 135 | IYIPFPEDDSNSTN | X | X | X | Q01668 |
| 92 | 136 | QHSPEAACPPTAGT | X | X | X | Q03721 |
| 93 | 137 | ASPPRRASSVG | X | X | X | Q04844 |
| 94 | 138 | PEVRCCVDAVN | X | X | X | Q04844 |
| 95 | 139 | PRLRHVLLELL | X | X | X | Q04844 |
| 96 | 140 | FIWDSAVLEFEASQ | X | X | X | Q05586 |
| 97 | 141 | LFLQKLPKLLC | X | X | X | Q05901 |
| 98 | 142 | SIIVTVFVINV | X | X | X | Q05901 |
| 99 | 143 | TLSIIVTVFVI | X | X | X | Q05901 |
| 100 | 144 | LFENADGRFEGSL | X | X | X | Q05901 |
| 101 | 145 | GVYNQPPPQPFPGD | X | X | X | Q07001 |
| 102 | 146 | LEEDREAVRREAER | X | X | X | Q08289 |
| 103 | 147 | KFKTTHAPPGDTLV | X | X | X | Q12809 |
| 104 | 148 | AGESTFANNKSSVP | X | X | X | Q13224 |
| 105 | 149 | EMSAGESTFANNKS | X | X | X | Q13224 |
| 106 | 150 | GNIEGNAAKRRKQQ | X | X | X | Q13224 |
| 107 | 151 | LGAAMALSLITFIC | X | X | X | Q13224 |
| 108 | 152 | SKHSQLSDLYGKFS | X | X | X | Q13224 |
| 109 | 153 | IGTDIVATVENEEP | X | X | X | Q13698 |
| 110 | 154 | CYFIGTDIVATVEN | X | X | X | Q13698 |
| 111 | 155 | FGKFCPHRVACKRL | X | X | X | Q13698 |
| 112 | 156 | AGYPSTVSTVE | X | X | X | Q13936 |
| 113 | 157 | FAQDPKFIEVT | X | X | X | Q13936 |
| 114 | 158 | GQFAQDPKFIE | X | X | X | Q13936 |
| 115 | 159 | PQPVPTLRLEGVES | X | X | X | Q13936 |
| 116 | 160 | QGSTTATRPPR | X | X | X | Q13936 |
| 117 | 161 | SSNRERHVPMCEDL | X | X | X | Q13936 |
| 118 | 162 | ALAHEDCPAIDQPA | X | X | X | Q14003 |
| 119 | 163 | GAAHVHGIVFEDNV | X | X | X | Q14957 |
| 120 | 164 | HVHGIVFEDNVDTE | X | X | X | Q14957 |
| 121 | 165 | PHMQKALEGVHYIA | X | X | X | Q15822 |
| 122 | 166 | EVAITQLANVDEVN | X | X | X | Q15825 |
| 123 | 167 | HCHKSNELATS | X | X | X | Q15825 |
| 124 | 168 | VDMNDFWENSE | X | X | X | Q15825 |
| 125 | 169 | WTYDKAEIDLL | X | X | X | Q15825 |
| 126 | 170 | LGRSNTIGSAP | X | X | X | Q15878 |
| 127 | 171 | MEPSSLPQEII | X | X | X | Q15878 |
| 128 | 172 | LFPVAFAGFNLVYW | X | X | X | Q16445 |
| 129 | 173 | RPGFGGAVTEVKTD | X | X | X | Q16445 |
| 130 | 174 | GAVMNKLLTMG | X | X | X | Q8IZS8 |
| 131 | 175 | RLTIAKQTVSS | X | X | X | Q8IZS8 |
| 132 | 176 | DMNFDFDLYIVGDG | X | X | X | Q8TCU5 |
| 133 | 177 | IEHPFVFTREVDDE | X | X | X | Q8TCU5 |
| 134 | 178 | YEWKSPFGLTPKGR | X | X | X | Q8TCU5 |
| 135 | 179 | ITIIFNKFSHFYRR | X | X | X | Q96KK3 |
| 136 | 180 | DDEDLAAKRLGIED | X | X | X | Q96PR1 |
| 137 | 181 | LSPPPRAPPLSPGP | X | X | X | Q96PR1 |
| 138 | 182 | ESEGEKENSTNDPE | X | X | X | Q9NS40 |
| 139 | 183 | ESLCSIRRASSVHD | X | X | X | Q9NS40 |
| 140 | 184 | LSFESEGEKENSTN | X | X | X | Q9NS40 |
| 141 | 185 | RSRESLCSIRRASS | X | X | X | Q9NS40 |
| 142 | 186 | SPTKESCSPSEADD | X | X | X | Q9NS40 |
| 143 | 187 | TLSDDDYVNVASFN | X | X | X | Q9NY47 |
| 144 | 188 | DEEGRGGAGGGGAG | X | X | X | Q9P0X4 |
| 145 | 189 | GGAGGGGDTEGGLC | X | X | X | Q9P0X4 |
| 146 | 190 | GRGGAGGGGAG | X | X | X | Q9P0X4 |
| 147 | 191 | RSPSWAADRSKDPP | X | X | X | Q9P0X4 |
| 148 | 192 | WGRSAAWASRR | X | X | X | Q9P0X4 |
| 149 | 193 | ASPSRDVSPMG | X | X | X | Q9UBN1 |
| 150 | 194 | GSWTYNGNQVD | X | X | X | Q9UGM1 |
| 151 | 195 | TDKVLNVTLQITLS | X | X | X | Q9UGM1 |
| 152 | 196 | VLFVYDVGESCLS | X | X | X | Q9UGM1 |
| 153 | 197 | FSRSYSELKEQQQR | X | X | X | Q9UJ96 |
| 154 | 198 | FQATWAVNNGIDTT | X | X | X | Q9ULD8 |
| 155 | 199 | KFFKNALNLIDLMS | X | X | X | Q9ULS6 |
| 156 | 200 | PRRHRRPRRVIARY | X | X | X | Q9UN88 |
| 157 | 201 | SRDASPVGIKGFNT | X | X | X | Q9Y698 |
| 158 | 202 | ILYAGNDRWTSDPR | | X | X | A6NGN9 |
| 159 | 203 | SWGSKIAPVYQQEE | | X | X | O00222 |
| 160 | 204 | FEQGKKSVTAPKFI | | X | X | O00222 |
| 161 | 205 | GKKSVTAPKFISPA | | X | X | O00222 |
| 162 | 206 | SVTAPKFISPASQL | | X | X | O00222 |
| 163 | 207 | ALMAHESGLKE | | X | X | O00555 |
| 164 | 208 | ARKPDHTTVDI | | X | X | O00555 |
| 165 | 209 | ASVAYENALRVFNI | | X | X | O00555 |
| 166 | 210 | DCRGKYLLYEKNEV | | X | X | O00555 |
| 167 | 211 | GADKQQMDAEL | | X | X | O00555 |
| 168 | 212 | GKYLLYEKNEV | | X | X | O00555 |
| 169 | 213 | GSYLRNGWNVM | | X | X | O00555 |
| 170 | 214 | HHGYYRGSDYD | | X | X | O00555 |
| 171 | 215 | LFIVVFALLGM | | X | X | O00555 |
| 172 | 216 | LGMQLFGGQFN | | X | X | O00555 |
| 173 | 217 | LRLLRIFKVTKYWA | | X | X | O00555 |
| 174 | 218 | LSGEFAKERER | | X | X | O00555 |
| 175 | 219 | MAHESGLKESP | | X | X | O00555 |
| 176 | 220 | NPDPLPKKEEE | | X | X | O00555 |
| 177 | 221 | NYTLLNVFLAIAVD | | X | X | O00555 |
| 178 | 222 | QGGQPGAQRMY | | X | X | O00555 |
| 179 | 223 | REALYNEMDPD | | X | X | O00555 |
| 180 | 224 | RPHVSYSPVIR | | X | X | O00555 |
| 181 | 225 | RTPLMFQRMEP | | X | X | O00555 |
| 182 | 226 | SAAPHGSLGHA | | X | X | O00555 |
| 183 | 227 | SGILTRECGNE | | X | X | O00555 |
| 184 | 228 | SLKNVFNILIV | | X | X | O00555 |
| 185 | 229 | TPRPHVSYSPV | | X | X | O00555 |
| 186 | 230 | TVFQILTGEDWNEV | | X | X | O00555 |
| 187 | 231 | VILAEDETDGE | | X | X | O00555 |
| 188 | 232 | YLTRDSSILGP | | X | X | O00555 |
| 189 | 233 | GGALMAHESGLKES | | X | X | O00555 |
| 190 | 234 | AAFMIQEEYVDTVS | | X | X | O15399 |
| 191 | 235 | APTSRSLEDLSSCP | | X | X | O15399 |
| 192 | 236 | PLWSRYGRFLQPVD | | X | X | O15399 |
| 193 | 237 | PQPLPSPAYPAPRP | | X | X | O15399 |
| 194 | 238 | QLQVIFEVLEEYDW | | X | X | O15399 |
| 195 | 239 | VIFEVLEEYDWTSF | | X | X | O15399 |
| 196 | 240 | YTANLAAFMIQEEY | | X | X | O15399 |
| 197 | 241 | ESQPLLGPGAGGAG | | X | X | O15399 |
| 198 | 242 | DPQIPLAEMEALSL | | X | X | O43497 |
| 199 | 243 | FIFIFSILGMHLFG | | X | X | O43497 |
| 200 | 244 | KGAINFDNIGY | | X | X | O43497 |
| 201 | 245 | NHNPWMLLYFISFL | | X | X | O43497 |
| 202 | 246 | PCEGLGRHATFRNF | | X | X | O43497 |
| 203 | 247 | PWMLLYFISFLLIV | | X | X | O43497 |
| 204 | 248 | PYCARAGAGEV | | X | X | O43497 |
| 205 | 249 | SPSLDGDGDRKKCL | | X | X | O43497 |
| 206 | 250 | VHHLVHHHHHHHHH | | X | X | O43497 |
| 207 | 251 | VRFLSNASTLA | | X | X | O43497 |
| 208 | 252 | CGLDYEAYNSSSNT | | X | X | O43497 |
| 209 | 253 | GAAGGGGDGGGGGG | | X | X | O43525 |
| 210 | 254 | GGGGDGGGGGGGAA | | X | X | O43525 |
| 211 | 255 | KARRAAGAAGGGGD | | X | X | O43525 |
| 212 | 256 | RAAGAAGGGGDGGG | | X | X | O43525 |
| 213 | 257 | YGDKTPKTWEGRLI | | X | X | O43525 |
| 214 | 258 | FARLPPYRYRFRRR | | X | X | O60359 |
| 215 | 259 | DFELYLVGDGKYGA | | X | X | O60391 |
| 216 | 260 | TGRLLMNLWAIFCL | | X | X | O60391 |
| 217 | 261 | KEETAEAEPSGPEV | | X | X | O60391 |
| 218 | 262 | EKRLGTPPGGGGAG | | X | X | O60741 |
| 219 | 263 | FWIIHPYSDFRFYW | | X | X | O60741 |
| 220 | 264 | LGTPPGGGGAGAKE | | X | X | O60741 |
| 221 | 265 | LLQDFPPDCWVSLN | | X | X | O60741 |
| 222 | 266 | LPADMRQKIHDYYE | | X | X | O60741 |
| 223 | 267 | MVGNLVIIPVGITF | | X | X | O60741 |
| 224 | 268 | PSAILSPCSYTTAV | | X | X | O60741 |
| 225 | 269 | TNLTREVRPLSASQ | | X | X | O60741 |
| 226 | 270 | TPQPSAILSPCSYT | | X | X | O60741 |
| 227 | 271 | YEHRYQGKIFDEEN | | X | X | O60741 |
| 228 | 272 | IQHGVAGVITKSSK | | X | X | O60741 |
| 229 | 273 | CGGILETTLVE | | X | X | O60840 |
| 230 | 274 | EEEEEEEEEEE | | X | X | O60840 |
| 231 | 275 | EEEEEEEEEEEEEE | | X | X | O60840 |
| 232 | 276 | GADMEEEEEEEEEE | | X | X | O60840 |
| 233 | 277 | HHGQPVWLTQIQEY | | X | X | O60840 |
| 234 | 278 | HSSAISVVKILRVL | | X | X | O60840 |
| 235 | 279 | IVAYGLVLHPS | | X | X | O60840 |
| 236 | 280 | IVDIAVTEVNN | | X | X | O60840 |
| 237 | 281 | LGMQLFGGKFNFDQ | | X | X | O60840 |
| 238 | 282 | LPASDTGSMTE | | X | X | O60840 |
| 239 | 283 | LYSDEESILSRFDE | | X | X | O60840 |
| 240 | 284 | MEEDLRGYLDWITQ | | X | X | O60840 |
| 241 | 285 | MEEEEEEEEEEEEE | | X | X | O60840 |
| 242 | 286 | PHQYRVWATVN | | X | X | O60840 |
| 243 | 287 | QENEGLVPGVEKEE | | X | X | O60840 |
| 244 | 288 | SAMMALFTVSTFEG | | X | X | O60840 |
| 245 | 289 | SHASLPASDTG | | X | X | O60840 |
| 246 | 290 | TCDTEEEEEEG | | X | X | O60840 |
| 247 | 291 | EGSGRVADVIAQVA | | X | X | O94759 |
| 248 | 292 | AESLDPRPLRP | | X | X | O95180 |
| 249 | 293 | ASVRTRKHTFGQRC | | X | X | O95180 |
| 250 | 294 | ATFCTLLMLFIFIF | | X | X | O95180 |
| 251 | 295 | DNVATFCTLLMLFI | | X | X | O95180 |
| 252 | 296 | DPYEKIPHVVGEHG | | X | X | O95180 |
| 253 | 297 | DTGDTVPDRKN | | X | X | O95180 |
| 254 | 298 | GVPSGDPFLDG | | X | X | O95180 |
| 255 | 299 | HAYLQSSWNLLDGL | | X | X | O95180 |
| 256 | 300 | KRRGLYLTVPQCPL | | X | X | O95180 |
| 257 | 301 | PGSPQRRAQQR | | X | X | O95180 |
| 258 | 302 | AEPALGARRKKKMS | | X | X | O95180 |
| 259 | 303 | GADEEQRVPYPALA | | X | X | O95180 |
| 260 | 304 | AGLVLGSEHETRLV | | X | X | P02708 |
| 261 | 305 | DEVNQIVTTNV | | X | X | P02708 |
| 262 | 306 | GLQLIQLINVDEVN | | X | X | P02708 |
| 263 | 307 | IQLINVDEVNQ | | X | X | P02708 |
| 264 | 308 | YCEIIVTHFPF | | X | X | P02708 |
| 265 | 309 | HSEENKAPESEELE | | X | X | P06213 |
| 266 | 310 | PAKMLLDPAAPAQE | | X | X | P07510 |
| 267 | 311 | ILIVVNA | | X | X | P07510 |
| 268 | 312 | SHFDNGNEEWFLV | | X | X | P07510 |
| 269 | 313 | AINCYANETCCDFF | | X | X | P07550 |
| 270 | 314 | DNIDSQGRNCSTND | | X | X | P07550 |
| 271 | 315 | DSQGRNCSTND | | X | X | P07550 |
| 272 | 316 | HDVTQERDEVW | | X | X | P07550 |
| 273 | 317 | AITSPFKYQSLLT | | X | X | P07550 |
| 274 | 318 | IDSQGRNCSTNDS | | X | X | P07550 |
| 275 | 319 | KYQSLLT | | X | X | P07550 |
| 276 | 320 | NIDSQGRNCSTND | | X | X | P07550 |
| 277 | 321 | DLIIGVFSMNL | | X | X | P08172 |
| 278 | 322 | IGVFSMNLYTLYTV | | X | X | P08172 |
| 279 | 323 | IVGVRTVEDGE | | X | X | P08172 |
| 280 | 324 | KSDSCTPTNTTVEV | | X | X | P08172 |
| 281 | 325 | MNNSTNSSNNS | | X | X | P08172 |
| 282 | 326 | TSLGHSKDENSKQT | | X | X | P08172 |
| 283 | 327 | MNNSTNS | | X | X | P08172 |
| 284 | 328 | MNNSTNSSNNSLA | | X | X | P08172 |
| 285 | 329 | NNSTNSSNNSLAL | | X | X | P08172 |
| 286 | 330 | TQDENTVSTSLGH | | X | X | P08172 |
| 287 | 331 | KEKKAKTLAFL | | X | X | P08173 |
| 288 | 332 | PATELSTTEAT | | X | X | P08173 |
| 289 | 333 | GSATQNT | | X | X | P08173 |
| 290 | 334 | YTVYIIKGYWPLG | | X | X | P08173 |
| 291 | 335 | APAPPPGPPRP | | X | X | P08588 |
| 292 | 336 | ERRFLGGPARP | | X | X | P08588 |
| 293 | 337 | NGGAAADSDSSLDE | | X | X | P08588 |
| 294 | 338 | YNDPKCCDFVT | | X | X | P08588 |
| 295 | 339 | AITSPFRYQSLLT | | X | X | P08588 |
| 296 | 340 | RYQSLLT | | X | X | P08588 |
| 297 | 341 | DYVASNASVMNLLV | | X | X | P08912 |
| 298 | 342 | EETEETFVKAE | | X | X | P08912 |
| 299 | 343 | GEEFSAEETEE | | X | X | P08912 |
| 300 | 344 | LVGKRTVPLDE | | X | X | P08912 |
| 301 | 345 | AEETEET | | X | X | P08912 |
| 302 | 346 | AEETEETFVKAET | | X | X | P08912 |
| 303 | 347 | CSSYPSSEDEDKP | | X | X | P08912 |
| 304 | 348 | EETEETFVKAETE | | X | X | P08912 |
| 305 | 349 | GEEFSAEETEETF | | X | X | P08912 |
| 306 | 350 | LFRSCLRCPRPTL | | X | X | P08912 |
| 307 | 351 | LGYWLCYVNSTVN | | X | X | P08912 |
| 308 | 352 | SAEETEE | | X | X | P08912 |
| 309 | 353 | TKAEKRKPAHRAL | | X | X | P08912 |
| 310 | 354 | YPSSEDEDKPATD | | X | X | P08912 |
| 311 | 355 | IYLALDVLFCT | | X | X | P08913 |
| 312 | 356 | VATLVIPFSLANEV | | X | X | P08913 |
| 313 | 357 | AALQGSETPGKGGG | | X | X | P11229 |
| 314 | 358 | ETENRARELAALQG | | X | X | P11229 |
| 315 | 359 | LVLISFKVNTE | | X | X | P11229 |
| 316 | 360 | PRSSPNTVKRP | | X | X | P11229 |
| 317 | 361 | QKPRGKEQLAK | | X | X | P11229 |
| 318 | 362 | PTKKGRD | | X | X | P11229 |
| 319 | 363 | PGALLML | | X | X | P11230 |
| 320 | 364 | WTFIIFTSVGTLV | | X | X | P11230 |
| 321 | 365 | VLVWVVSAAVS | | X | X | P13945 |
| 322 | 366 | YGALVTK | | X | X | P13945 |
| 323 | 367 | GKTRTSLKTMSRRK | | X | X | P14416 |
| 324 | 368 | DIVAIIPYFITLGT | | X | X | P16389 |
| 325 | 369 | ENEFQRQVWLLFEY | | X | X | P16389 |
| 326 | 370 | EYPESSGPARIIAI | | X | X | P16389 |
| 327 | 371 | IGVILFSSAVYFAE | | X | X | P16389 |
| 328 | 372 | QSTSFTDPFFIVET | | X | X | P16389 |
| 329 | 373 | QEGVNNSNEDFREE | | X | X | P16389 |
| 330 | 374 | TWTLKKLPLSLSFL | | X | X | P16473 |
| 331 | 375 | NNGGVSRVSPVSRG | | X | X | P17658 |
| 332 | 376 | FRSWTYDRTEIDLV | | X | X | P17787 |
| 333 | 377 | LDDFTPSGEWDIVA | | X | X | P17787 |
| 334 | 378 | LPPAIYKSACK | | X | X | P17787 |
| 335 | 379 | NVWLTQEWEDY | | X | X | P17787 |
| 336 | 380 | RHHCARQRLRLRRR | | X | X | P17787 |
| 337 | 381 | WTYDRTEIDLV | | X | X | P17787 |
| 338 | 382 | AEEEEEEEEEE | | X | X | P18089 |
| 339 | 383 | ASVASAREVNG | | X | X | P18089 |
| 340 | 384 | DEAEEEEEEEE | | X | X | P18089 |
| 341 | 385 | DEAEEEEEEEEEEE | | X | X | P18089 |
| 342 | 386 | EAEEEEEEEEE | | X | X | P18089 |
| 343 | 387 | EDEAEEEEEEE | | X | X | P18089 |
| 344 | 388 | EEECEPQAVPV | | X | X | P18089 |
| 345 | 389 | EEEEEEEEECE | | X | X | P18089 |
| 346 | 390 | EEEEEEEEEEC | | X | X | P18089 |
| 347 | 391 | EEEEEEEEEEEECE | | X | X | P18089 |
| 348 | 392 | GQGQKEGVCGA | | X | X | P18089 |
| 349 | 393 | LPNSGQGQKEG | | X | X | P18089 |
| 350 | 394 | PNSGQGQKEGV | | X | X | P18089 |
| 351 | 395 | SGQGQKEGVCG | | X | X | P18089 |
| 352 | 396 | SPEDEAEEEEEEEE | | X | X | P18089 |
| 353 | 397 | AALPNSGQGQKEG | | X | X | P18089 |
| 354 | 398 | CIILTVWLIAAVI | | X | X | P18089 |
| 355 | 399 | LPNSGQGQKEGVC | | X | X | P18089 |
| 356 | 400 | PNSGQGQKEGVCG | | X | X | P18089 |
| 357 | 401 | QGQKEGV | | X | X | P18089 |
| 358 | 402 | SGQGQKE | | X | X | P18089 |
| 359 | 403 | STGEKEE | | X | X | P18089 |
| 360 | 404 | ACMMDLRRYPLDEQ | | X | X | P18505 |
| 361 | 405 | EIRNETSGSEVLTS | | X | X | P18505 |
| 362 | 406 | AQAREKRFTFV | | X | X | P18825 |
| 363 | 407 | AAALAVA | | X | X | P18825 |
| 364 | 408 | AVLTSRA | | X | X | P18825 |
| 365 | 409 | RRSFKHILFRRRR | | X | X | P18825 |
| 366 | 410 | RSFKHILFRRRRR | | X | X | P18825 |
| 367 | 411 | DSWNNND | | X | X | P20309 |
| 368 | 412 | LQQQSMKRSNRRK | | X | X | P20309 |
| 369 | 413 | VVPGDHLLEPEVAD | | X | X | P22001 |
| 370 | 414 | EEEEEEEEEEGRFY | | X | X | P22459 |
| 371 | 415 | ESLCAKEEKCQGKG | | X | X | P22459 |
| 372 | 416 | HCSDLMPSGSEEKI | | X | X | P22459 |
| 373 | 417 | KKQIWLLFEYPESS | | X | X | P22459 |
| 374 | 418 | SSSLGDKSEYLEME | | X | X | P22459 |
| 375 | 419 | HDPQSSRGSRRRRR | | X | X | P22459 |
| 376 | 420 | QSSRGSRRRRRQRS | | X | X | P22459 |
| 377 | 421 | GPKEPAPKGRGAQR | | X | X | P22460 |
| 378 | 422 | LRYFDPLRNEYFFD | | X | X | P22460 |
| 379 | 423 | LYALCLDTSRETDL | | X | X | P22460 |
| 380 | 424 | MAVCLLFVFSALLE | | X | X | P23415 |
| 381 | 425 | FTMTLYLRHYWKDE | | X | X | P24046 |
| 382 | 426 | GVDVQVESLDSISE | | X | X | P24046 |
| 383 | 427 | WKDERLSFPSTNNL | | X | X | P24046 |
| 384 | 428 | APQSLLTMEEIQSV | | X | X | P25098 |
| 385 | 429 | EARPLVEFYEE | | X | X | P25098 |
| 386 | 430 | EGEAPQSLLTMEEI | | X | X | P25098 |
| 387 | 431 | EIQSVEETQIKERK | | X | X | P25098 |
| 388 | 432 | FCLNHLEEARPLVE | | X | X | P25098 |
| 389 | 433 | LEEARPLVEFY | | X | X | P25098 |
| 390 | 434 | LLLKIRGGKQFILQ | | X | X | P25098 |
| 391 | 435 | NHLEEARPLVEFYE | | X | X | P25098 |
| 392 | 436 | QKYPPPLIPPRGEV | | X | X | P25098 |
| 393 | 437 | QSLLTMEEIQS | | X | X | P25098 |
| 394 | 438 | QVPPDLFQPYIEEI | | X | X | P25098 |
| 395 | 439 | SDKFTRFCQWK | | X | X | P25098 |
| 396 | 440 | SLLTMEEIQSVEET | | X | X | P25098 |
| 397 | 441 | TVFDTINAETDRLE | | X | X | P25098 |
| 398 | 442 | AMEKSKA | | X | X | P25098 |
| 399 | 443 | EAPQSLLTMEEIQ | | X | X | P25098 |
| 400 | 444 | EIQSVEETQIKER | | X | X | P25098 |
| 401 | 445 | ETQIKER | | X | X | P25098 |
| 402 | 446 | GEGEAPQSLLTME | | X | X | P25098 |
| 403 | 447 | QSLLTME | | X | X | P25098 |
| 404 | 448 | RGEGEAPQSLLTM | | X | X | P25098 |
| 405 | 449 | SLLTMEE | | X | X | P25098 |
| 406 | 450 | VHRIIGRGGFGEV | | X | X | P25098 |
| 407 | 451 | WRGEGEAPQSLLT | | X | X | P25098 |
| 408 | 452 | IMTERKAAAILALL | | X | X | P25100 |
| 409 | 453 | LLKFSREKKAAKTL | | X | X | P25100 |
| 410 | 454 | LLRCQCRRRRR | | X | X | P25100 |
| 411 | 455 | LLSVSFEGPRPDSS | | X | X | P25100 |
| 412 | 456 | LRLLRCQCRRRRRR | | X | X | P25100 |
| 413 | 457 | RRRRRRRPLWR | | X | X | P25100 |
| 414 | 458 | CRRRRRRRPLWRV | | X | X | P25100 |
| 415 | 459 | LRCQCRRRRRRRP | | X | X | P25100 |
| 416 | 460 | LRLLRCQCRRRRR | | X | X | P25100 |
| 417 | 461 | QCRRRRRRRPLWR | | X | X | P25100 |
| 418 | 462 | RCQCRRRRRRRPL | | X | X | P25100 |
| 419 | 463 | RLLRCQCRRRRRR | | X | X | P25100 |
| 420 | 464 | YPAIMTERKAAAI | | X | X | P25100 |
| 421 | 465 | EIIPSSSKVIPLIG | | X | X | P30532 |
| 422 | 466 | RSHVDRYFTQKEET | | X | X | P30532 |
| 423 | 467 | LKQEWTDYRLT | | X | X | P30926 |
| 424 | 468 | LMTPTASMDDF | | X | X | P30926 |
| 425 | 469 | MFVCVLGTVGL | | X | X | P30926 |
| 426 | 470 | QLSLAQLISVN | | X | X | P30926 |
| 427 | 471 | RPATSSSQLIS | | X | X | P30926 |
| 428 | 472 | SKSPAGSTPVAIPR | | X | X | P30926 |
| 429 | 473 | STHTMAPWVKRCFL | | X | X | P30926 |
| 430 | 474 | VCVLGTVGLFL | | X | X | P30926 |
| 431 | 475 | YEVSVYTNLIV | | X | X | P30926 |
| 432 | 476 | SEGPYAA | | X | X | P30926 |
| 433 | 477 | AEHRLFERLFEDYN | | X | X | P32297 |
| 434 | 478 | ERLFEDYNEIIRP | | X | X | P32297 |
| 435 | 479 | LNQYDLLGHVVGTE | | X | X | P34903 |
| 436 | 480 | ETKTYNSVSKVDKI | | X | X | P34903 |
| 437 | 481 | AAKTLGIVVGCFVL | | X | X | P35348 |
| 438 | 482 | GGSGMASAKTK | | X | X | P35348 |
| 439 | 483 | ILLGVILGGLILFG | | X | X | P35348 |
| 440 | 484 | TFYRISKTDGV | | X | X | P35348 |
| 441 | 485 | YRISKTDGVCE | | X | X | P35348 |
| 442 | 486 | DQSSCTTARVRSK | | X | X | P35348 |
| 443 | 487 | CQCRGRGRRRRRRR | | X | X | P35368 |
| 444 | 488 | LGCQCRGRGRRRRR | | X | X | P35368 |
| 445 | 489 | LSLCAISIDRYIGV | | X | X | P35368 |
| 446 | 490 | QCRGRGRRRRRRRR | | X | X | P35368 |
| 447 | 491 | RGRGRRRRRRR | | X | X | P35368 |
| 448 | 492 | RGRGRRRRRRRRRL | | X | X | P35368 |
| 449 | 493 | RHDSGPLFTFKLLT | | X | X | P35368 |
| 450 | 494 | GCQCRGRGRRRRR | | X | X | P35368 |
| 451 | 495 | GRRRRRRRRRLGG | | X | X | P35368 |
| 452 | 496 | RRRRRRRLGGCAY | | X | X | P35368 |
| 453 | 497 | RRRRRRRRLGGCA | | X | X | P35368 |
| 454 | 498 | RRRRRRRRRLGGC | | X | X | P35368 |
| 455 | 499 | DEKNQVLTTNI | | X | X | P36544 |
| 456 | 500 | AQEVASTLASSPPS | | X | X | P37088 |
| 457 | 501 | GRGAQEVASTLASS | | X | X | P37088 |
| 458 | 502 | ETAAEILKQILFMG | | X | X | P39086 |
| 459 | 503 | GVSCVLFVIARFTP | | X | X | P39086 |
| 460 | 504 | KPLLKEMKKGKEFY | | X | X | P39086 |
| 461 | 505 | RIGGIFETVENEPV | | X | X | P39086 |
| 462 | 506 | ALVTKTNRIARILA | | X | X | P41594 |
| 463 | 507 | MEPPDIMHDYPSIR | | X | X | P41594 |
| 464 | 508 | CEKGQIKVIRKGEV | | X | X | P41594 |
| 465 | 509 | ANQFEGNDRYEGYC | | X | X | P42261 |
| 466 | 510 | FNSLWFSLGAFMQQ | | X | X | P42261 |
| 467 | 511 | GIRKIGYWNEDDKF | | X | X | P42261 |
| 468 | 512 | HVCFITPSFPVDTS | | X | X | P42261 |
| 469 | 513 | LTVERMVSPIESAE | | X | X | P42261 |
| 470 | 514 | PCMSHSSGMPLGAT | | X | X | P42261 |
| 471 | 515 | RKSKGKYAYLLEST | | X | X | P42261 |
| 472 | 516 | ERLVVVDCESERLN | | X | X | P42261 |
| 473 | 517 | MRSAEPSVFVRTTA | | X | X | P42262 |
| 474 | 518 | SRAEAKRMKVAKNA | | X | X | P42262 |
| 475 | 519 | IAVYEKMWSYMKSA | | X | X | P42263 |
| 476 | 520 | KIAVYEKMWSYMKS | | X | X | P42263 |
| 477 | 521 | PYEWHLEDNNEEPR | | X | X | P42263 |
| 478 | 522 | WEKFVYLYDTERGF | | X | X | P42263 |
| 479 | 523 | NFKPAPATNTQNYA | | X | X | P42263 |
| 480 | 524 | RVRKSKGKFAFLLE | | X | X | P42263 |
| 481 | 525 | LHRQNEEPVFSKDG | | X | X | P42658 |
| 482 | 526 | LYSANTVGNFNRQC | | X | X | P42658 |
| 483 | 527 | APSRTIPTACVRPT | | X | X | P43146 |
| 484 | 528 | DPTDPVDYYPLLDD | | X | X | P43146 |
| 485 | 529 | SITDPTDPVDYYPL | | X | X | P43146 |
| 486 | 530 | DQLPPQQPLEA | | X | X | P43681 |
| 487 | 531 | DVVLVRFGLSIAQL | | X | X | P43681 |
| 488 | 532 | HSRVDQLDFWE | | X | X | P43681 |
| 489 | 533 | PDQPSPCKCTC | | X | X | P43681 |
| 490 | 534 | RVDQLDFWESG | | X | X | P43681 |
| 491 | 535 | SAELPPPDQPS | | X | X | P43681 |
| 492 | 536 | ELPPPDQPSPCKC | | X | X | P43681 |
| 493 | 537 | NTHSAELPPPDQP | | X | X | P43681 |
| 494 | 538 | PPPDQPSPCKCTC | | X | X | P43681 |
| 495 | 539 | RIFLWMFIIVCLL | | X | X | P43681 |
| 496 | 540 | THSAELPPPDQPS | | X | X | P43681 |
| 497 | 541 | NMQFLLFVFLVWDP | | X | X | P47869 |
| 498 | 542 | SVQVAPDGSRLNQY | | X | X | P47869 |
| 499 | 543 | CALAGVLTIAMPVP | | X | X | P48547 |
| 500 | 544 | HFDYDPRADEFFFD | | X | X | P48547 |
| 501 | 545 | LSGLSSKAAKDVLG | | X | X | P48547 |
| 502 | 546 | PVPVIVNNFGMYYS | | X | X | P48547 |
| 503 | 547 | VFAHILNYYRTGKL | | X | X | P48547 |
| 504 | 548 | WLAEPDAHSHFDYD | | X | X | P48547 |
| 505 | 549 | CQARQFRTFHHPTY | | X | X | P51172 |
| 506 | 550 | KDNGVTPGEKMLTV | | X | X | P51787 |
| 507 | 551 | TYEQLTVPRRGPDE | | X | X | P51787 |
| 508 | 552 | ERPTGWKCFVYHFA | | X | X | P51787 |
| 509 | 553 | KCFVYHFAVFLIVL | | X | X | P51787 |
| 510 | 554 | NFLERPTGWKCFVY | | X | X | P51787 |
| 511 | 555 | TGWKCFVYHFAVFL | | X | X | P51787 |
| 512 | 556 | AAAWSILQQFL | | X | X | P54289 |
| 513 | 557 | QWREDFASNEV | | X | X | P54289 |
| 514 | 558 | SCFQHLVQANV | | X | X | P54289 |
| 515 | 559 | VDVSGSVSGLT | | X | X | P54289 |
| 516 | 560 | YDVRRRPWYIQ | | X | X | P54289 |
| 517 | 561 | LEETITQARYSETL | | X | X | P54289 |
| 518 | 562 | GSPLPPGAPLPGPG | | X | X | P56696 |
| 519 | 563 | PRTSAEDAPSEEVA | | X | X | P56696 |
| 520 | 564 | APRAELVALTAVQS | | X | X | P56696 |
| 521 | 565 | DITSDYHSPVDHED | | X | X | P56696 |
| 522 | 566 | AAEAPEGVDPP | | X | X | Q00975 |
| 523 | 567 | CLSPTNLLRRF | | X | X | Q00975 |
| 524 | 568 | DFVVVLTGILATAG | | X | X | Q00975 |
| 525 | 569 | EMDPEERLRFA | | X | X | Q00975 |
| 526 | 570 | FIMAMIALNTV | | X | X | Q00975 |
| 527 | 571 | GPDGEPQPGLE | | X | X | Q00975 |
| 528 | 572 | GPTGCRRERER | | X | X | Q00975 |
| 529 | 573 | PGPHPQGSGSV | | X | X | Q00975 |
| 530 | 574 | QGPSPGYRMEL | | X | X | Q00975 |
| 531 | 575 | RARGGGAGGAG | | X | X | Q00975 |
| 532 | 576 | RARGGGAGGAGGPG | | X | X | Q00975 |
| 533 | 577 | RGGGAGGAGGP | | X | X | Q00975 |
| 534 | 578 | RQKSSTSLSNGGAI | | X | X | Q00975 |
| 535 | 579 | RRGPDGEPQPG | | X | X | Q00975 |
| 536 | 580 | TDAEPVGDFPC | | X | X | Q00975 |
| 537 | 581 | YKRLVRMNMPISNE | | X | X | Q00975 |
| 538 | 582 | YSEMDPEERLR | | X | X | Q00975 |
| 539 | 583 | GGERARGGGAGGAG | | X | X | Q00975 |
| 540 | 584 | ACISIVEWKPF | | X | X | Q01668 |
| 541 | 585 | AKSNPEECRGL | | X | X | Q01668 |
| 542 | 586 | ALLGNHVNHVN | | X | X | Q01668 |
| 543 | 587 | ECLRRQSSQEE | | X | X | Q01668 |
| 544 | 588 | EIRRAISCDLQDDE | | X | X | Q01668 |
| 545 | 589 | ESVNTENVSGE | | X | X | Q01668 |
| 546 | 590 | ETESVNTENVS | | X | X | Q01668 |
| 547 | 591 | GALLGNHVNHVNSD | | X | X | Q01668 |
| 548 | 592 | GLGRYARDPKFVSA | | X | X | Q01668 |
| 549 | 593 | GRYARDPKFVS | | X | X | Q01668 |
| 550 | 594 | IGVQLFKGKFYRCT | | X | X | Q01668 |
| 551 | 595 | IIVAFFMMNIFVGF | | X | X | Q01668 |
| 552 | 596 | ILLAIFANCVALAI | | X | X | Q01668 |
| 553 | 597 | LGNHVNHVNSD | | X | X | Q01668 |
| 554 | 598 | LPYVALLIAML | | X | X | Q01668 |
| 555 | 599 | LTISSEHYNQPDWL | | X | X | Q01668 |
| 556 | 600 | NLADAESLNTA | | X | X | Q01668 |
| 557 | 601 | PFPEDDSNSTN | | X | X | Q01668 |
| 558 | 602 | SETESVNTENVSGE | | X | X | Q01668 |
| 559 | 603 | TSMPTSETESVNTE | | X | X | Q01668 |
| 560 | 604 | FVIVTFQEQGEKEY | | X | X | Q01668 |
| 561 | 605 | PFPEDDSNSTNHNL | | X | X | Q01668 |
| 562 | 606 | SRRWRRWNRFNRRR | | X | X | Q01668 |
| 563 | 607 | WSEYDPEAKGRIKH | | X | X | Q01668 |
| 564 | 608 | ARQGSWEDEEE | | X | X | Q02641 |
| 565 | 609 | EDEEEDYEEEL | | X | X | Q02641 |
| 566 | 610 | EEEDYEEELTD | | X | X | Q02641 |
| 567 | 611 | GDNSSSSLGDV | | X | X | Q02641 |
| 568 | 612 | LGRNKNELEGW | | X | X | Q02641 |
| 569 | 613 | NSAYTELGDSC | | X | X | Q02641 |
| 570 | 614 | PGSRNSAYTEL | | X | X | Q02641 |
| 571 | 615 | QGSWEDEEEDY | | X | X | Q02641 |
| 572 | 616 | SQEIPMEVFDP | | X | X | Q02641 |
| 573 | 617 | SRNSAYTELGD | | X | X | Q02641 |
| 574 | 618 | SRNSAYTELGDSCV | | X | X | Q02641 |
| 575 | 619 | SWEDEEEDYEE | | X | X | Q02641 |
| 576 | 620 | YNPSPGDEVPV | | X | X | Q02641 |
| 577 | 621 | YPPSQEIPMEVFDP | | X | X | Q02641 |
| 578 | 622 | CPADVCGPLFEEEL | | X | X | Q03721 |
| 579 | 623 | ITSVHFRREVETEP | | X | X | Q03721 |
| 580 | 624 | NKPPSKTCLKEEMA | | X | X | Q03721 |
| 581 | 625 | DDFGGIETLRV | | X | X | Q04844 |
| 582 | 626 | GKTINKIDIDTEAY | | X | X | Q04844 |
| 583 | 627 | SLNEKEETLTT | | X | X | Q04844 |
| 584 | 628 | KIQLNATSVTHKPN | | X | X | Q05586 |
| 585 | 629 | PFGRFKVNSEEEEE | | X | X | Q05586 |
| 586 | 630 | VPPYSHQSSVWFEM | | X | X | Q05586 |
| 587 | 631 | IPCLGLSFLTVLVF | | X | X | Q05901 |
| 588 | 632 | IVTVFVINVHH | | X | X | Q05901 |
| 589 | 633 | CLFVVTPVMVV | | X | X | Q07001 |
| 590 | 634 | GANFIVNHMRD | | X | X | Q07001 |
| 591 | 635 | NQPPPQPFPGD | | X | X | Q07001 |
| 592 | 636 | PPPQPFPGDPY | | X | X | Q07001 |
| 593 | 637 | CLFVVTPVMVVGT | | X | X | Q07001 |
| 594 | 638 | DVSLEEDREAVRRE | | X | X | Q08289 |
| 595 | 639 | EKFNNDWWIGR | | X | X | Q08289 |
| 596 | 640 | HTPPYDVVPSMRPV | | X | X | Q08289 |
| 597 | 641 | YVEPKEDYSHDHVD | | X | X | Q08289 |
| 598 | 642 | TTVIYNSNIFTDPF | | X | X | Q09470 |
| 599 | 643 | IAEQEGNQKGEQAT | | X | X | Q09470 |
| 600 | 644 | FMACEELPPGAPEL | | X | X | Q12809 |
| 601 | 645 | GESPSSGPSSPESS | | X | X | Q12809 |
| 602 | 646 | LRLVRVARKLDRYS | | X | X | Q12809 |
| 603 | 647 | KFSYIPEAKASCYG | | X | X | Q12879 |
| 604 | 648 | LLVLPALLVWRGPA | | X | X | Q12879 |
| 605 | 649 | NSTNEGMNVKKCCK | | X | X | Q12879 |
| 606 | 650 | PSFTIGKAIWLLWG | | X | X | Q12879 |
| 607 | 651 | PSGLISVSYDDWDY | | X | X | Q12879 |
| 608 | 652 | LRISRQHSYDNIVD | | X | X | Q12879 |
| 609 | 653 | HSYDNIVDKPRELD | | X | X | Q12879 |
| 610 | 654 | KLSGKKSSLFPQGL | | X | X | Q12879 |
| 611 | 655 | MSLIKEAHWEGLTG | | X | X | Q13002 |
| 612 | 656 | IPVSFEWSNDSSVI | | X | X | Q13018 |
| 613 | 657 | SDRTPVVSSFLDNT | | X | X | Q13018 |
| 614 | 658 | TIKDEAENAFLLEE | | X | X | Q13018 |
| 615 | 659 | AMALSLITFICEHL | | X | X | Q13224 |
| 616 | 660 | APWEKNLTNVEWED | | X | X | Q13224 |
| 617 | 661 | ASVMLNIMEEYDWY | | X | X | Q13224 |
| 618 | 662 | EGNAAKRRKQQYKD | | X | X | Q13224 |
| 619 | 663 | ETEEQEDDHLSIVT | | X | X | Q13224 |
| 620 | 664 | FPTGLISVSYDEWD | | X | X | Q13224 |
| 621 | 665 | GVPAPWEKNLTNVE | | X | X | Q13224 |
| 622 | 666 | HMFEMSAGESTFAN | | X | X | Q13224 |
| 623 | 667 | IENSFVGWELEEVL | | X | X | Q13224 |
| 624 | 668 | QFGPSIEQQASVML | | X | X | Q13224 |
| 625 | 669 | SRREFDEIELAYRR | | X | X | Q13224 |
| 626 | 670 | RERLPKARVVVCFC | | X | X | Q13255 |
| 627 | 671 | SAMCYSALVTKTNR | | X | X | Q13255 |
| 628 | 672 | ADFPGDDEEDEPEI | | X | X | Q13698 |
| 629 | 673 | DIVATVENEEP | | X | X | Q13698 |
| 630 | 674 | FIGTDIVATVE | | X | X | Q13698 |
| 631 | 675 | GSLDQHQGSQE | | X | X | Q13698 |
| 632 | 676 | GTDIVATVENE | | X | X | Q13698 |
| 633 | 677 | IDEFESNVNEV | | X | X | Q13698 |
| 634 | 678 | KLCDPESDYAPGEE | | X | X | Q13698 |
| 635 | 679 | KLMAFKARGYFGDP | | X | X | Q13698 |
| 636 | 680 | LLIQKALVRGGLGT | | X | X | Q13698 |
| 637 | 681 | TDLSKMTEEEC | | X | X | Q13698 |
| 638 | 682 | TGQALADACQMEPE | | X | X | Q13698 |
| 639 | 683 | TSMKLLDQVIPPIG | | X | X | Q13698 |
| 640 | 684 | YPSADFPGDDEEDE | | X | X | Q13698 |
| 641 | 685 | DIVATVENEEPSPC | | X | X | Q13698 |
| 642 | 686 | PDKSEEEKSTMAKK | | X | X | Q13698 |
| 643 | 687 | AAIDAARQAKLMGS | | X | X | Q13936 |
| 644 | 688 | DAARQAKLMGSAGN | | X | X | Q13936 |
| 645 | 689 | EGLGQFAQDPKFIE | | X | X | Q13936 |
| 646 | 690 | GQFAQDPKFIEVTT | | X | X | Q13936 |
| 647 | 691 | GWPPQPVPTLR | | X | X | Q13936 |
| 648 | 692 | GWPPQPVPTLRLEG | | X | X | Q13936 |
| 649 | 693 | IVTFQEQGEQE | | X | X | Q13936 |
| 650 | 694 | LETGHGRQCQN | | X | X | Q13936 |
| 651 | 695 | LRRDSGSAGTQAHC | | X | X | Q13936 |
| 652 | 696 | PPQPVPTLRLE | | X | X | Q13936 |
| 653 | 697 | QDPKFIEVTTQ | | X | X | Q13936 |
| 654 | 698 | QPVPTLRLEGV | | X | X | Q13936 |
| 655 | 699 | SMNAEENSRIS | | X | X | Q13936 |
| 656 | 700 | VACKRLVSMNM | | X | X | Q13936 |
| 657 | 701 | YPSTVSTVEGH | | X | X | Q13936 |
| 658 | 702 | PRPAGYPSTVSTVE | | X | X | Q13936 |
| 659 | 703 | YIPFPEDDSNATNS | | X | X | Q13936 |
| 660 | 704 | FPEDDSNATNSNLE | | X | X | Q13936 |
| 661 | 705 | LLYRSIDSHTEDKG | | X | X | Q13936 |
| 662 | 706 | CPAIDQPAMSPEDK | | X | X | Q14003 |
| 663 | 707 | ENITNVEVETEPFL | | X | X | Q14003 |
| 664 | 708 | ESPPPPPLPPQQQQ | | X | X | Q14003 |
| 665 | 709 | HEDCPAIDQPAMSP | | X | X | Q14003 |
| 666 | 710 | IPGAPPENITNVEV | | X | X | Q14003 |
| 667 | 711 | PNYCKPDPPPPPPP | | X | X | Q14003 |
| 668 | 712 | ERIGADPDDILGSN | | X | X | Q14003 |
| 669 | 713 | VKSVQPGEVCCWLC | | X | X | Q14416 |
| 670 | 714 | AEKDEDDTKFKSIP | | X | X | Q14721 |
| 671 | 715 | FPGPCTWRRISSLE | | X | X | Q14957 |
| 672 | 716 | FVAYCSREEAEVLF | | X | X | Q14957 |
| 673 | 717 | GIVFEDNVDTEAVA | | X | X | Q14957 |
| 674 | 718 | KRVRGVWNGMIGEV | | X | X | Q14957 |
| 675 | 719 | LAAFMIQEQYIDTV | | X | X | Q14957 |
| 676 | 720 | PATFPVGLISVVTE | | X | X | Q14957 |
| 677 | 721 | PCTWRRISSLESEV | | X | X | Q14957 |
| 678 | 722 | PLEIQPLTVGVNTT | | X | X | Q14957 |
| 679 | 723 | LEIQPLTVGVNTTN | | X | X | Q14957 |
| 680 | 724 | VEEEDRWACAG | | X | X | Q15822 |
| 681 | 725 | GSWTYDKAEID | | X | X | Q15825 |
| 682 | 726 | IGSKVDMNDFW | | X | X | Q15825 |
| 683 | 727 | KSSCPMDITFF | | X | X | Q15825 |
| 684 | 728 | QLANVDEVNQI | | X | X | Q15825 |
| 685 | 729 | SKVDMNDFWEN | | X | X | Q15825 |
| 686 | 730 | YNCCEEIYTDITYS | | X | X | Q15825 |
| 687 | 731 | APMFQRMEPSS | | X | X | Q15878 |
| 688 | 732 | EEETLTFEAAV | | X | X | Q15878 |
| 689 | 733 | GSAPPLRHSWQMPN | | X | X | Q15878 |
| 690 | 734 | GTNKGRDIKTI | | X | X | Q15878 |
| 691 | 735 | HRACFMNNSGILEG | | X | X | Q15878 |
| 692 | 736 | ITMEGWTTVLY | | X | X | Q15878 |
| 693 | 737 | KNAPMFQRMEP | | X | X | Q15878 |
| 694 | 738 | MMKYYSAPCTYELA | | X | X | Q15878 |
| 695 | 739 | QCITMEGWTTV | | X | X | Q15878 |
| 696 | 740 | QELTKDEQEEEEAF | | X | X | Q15878 |
| 697 | 741 | QQEAGGGEAVV | | X | X | Q15878 |
| 698 | 742 | RERGRSKERKHLLS | | X | X | Q15878 |
| 699 | 743 | SPLKEAEIREDEEE | | X | X | Q15878 |
| 700 | 744 | TDPSSMRRSFSTIR | | X | X | Q15878 |
| 701 | 745 | PMRLVNFPMDGHAC | | X | X | Q16445 |
| 702 | 746 | ALSRGHGKYFF | | X | X | Q8IZS8 |
| 703 | 747 | DGAHGLLDPYN | | X | X | Q8IZS8 |
| 704 | 748 | ESLNKVFVDNF | | X | X | Q8IZS8 |
| 705 | 749 | IMLITDGAVDTYDT | | X | X | Q8IZS8 |
| 706 | 750 | PELRLLYEEGK | | X | X | Q8IZS8 |
| 707 | 751 | PGIKWEPDENG | | X | X | Q8IZS8 |
| 708 | 752 | TIAKQTVSSIL | | X | X | Q8IZS8 |
| 709 | 753 | TTVAMPVFSKQ | | X | X | Q8IZS8 |
| 710 | 754 | VDKGKRVLVMTNDY | | X | X | Q8IZS8 |
| 711 | 755 | RIAKIDSYSRIFFP | | X | X | Q8N1C3 |
| 712 | 756 | KFRSARYSRSLSTE | | X | X | Q8TAE7 |
| 713 | 757 | RTFEEPTSSLAAQI | | X | X | Q8TAE7 |
| 714 | 758 | FIMDKALLDYEVSI | | X | X | Q8TCU5 |
| 715 | 759 | IPSTMNCMEVETTN | | X | X | Q8TCU5 |
| 716 | 760 | QRLHRAINTSFIEE | | X | X | Q8TCU5 |
| 717 | 761 | DAFIMDKALLDYEV | | X | X | Q8TCU5 |
| 718 | 762 | KTKRVEKRSNVGPR | | X | X | Q8TCU5 |
| 719 | 763 | ETECFFVEPDEPFH | | X | X | Q8TDD5 |
| 720 | 764 | GGGGGGGGGAG | | X | X | Q8WXS5 |
| 721 | 765 | GLAGAGGGGGGAVG | | X | X | Q8WXS5 |
| 722 | 766 | SNIIGVIVYIS | | X | X | Q8WXS5 |
| 723 | 767 | VAAGLAGAGGGGGG | | X | X | Q8WXS5 |
| 724 | 768 | RLPSYRFRYRRRSR | | X | X | Q8WXS5 |
| 725 | 769 | FSSRERRSFTEIDT | | X | X | Q92953 |
| 726 | 770 | KEQMNEELRREAET | | X | X | Q92953 |
| 727 | 771 | RSFTEIDTGDDEDF | | X | X | Q92953 |
| 728 | 772 | SADDNHLSPSRWKW | | X | X | Q92953 |
| 729 | 773 | VCDDYNLNENEYFF | | X | X | Q92953 |
| 730 | 774 | CDDYDEAAREFYFD | | X | X | Q96KK3 |
| 731 | 775 | LRSLGATLKHSYRE | | X | X | Q96KK3 |
| 732 | 776 | VSEASLETSRETSQ | | X | X | Q96KK3 |
| 733 | 777 | VYCSDGFCELAGFA | | X | X | Q96L42 |
| 734 | 778 | IRVSRSNSPKTKQE | | X | X | Q96L42 |
| 735 | 779 | SPICTRGSSSRNKK | | X | X | Q96L42 |
| 736 | 780 | TLPGTRLALLASSE | | X | X | Q96PR1 |
| 737 | 781 | LEGKANGGLVDGEV | | X | X | Q96RP8 |
| 738 | 782 | CGPSVRPVPAW | | X | X | Q9GZZ6 |
| 739 | 783 | DRFFLAIFFSM | | X | X | Q9GZZ6 |
| 740 | 784 | FFLAIFFSMAL | | X | X | Q9GZZ6 |
| 741 | 785 | QSRPPELSPSPQSP | | X | X | Q9GZZ6 |
| 742 | 786 | RPPELSPSPQS | | X | X | Q9GZZ6 |
| 743 | 787 | LSPSPQS | | X | X | Q9GZZ6 |
| 744 | 788 | LYLWIRQ | | X | X | Q9GZZ6 |
| 745 | 789 | QGHASYILEAPASN | | X | X | Q9H252 |
| 746 | 790 | GSQNSMGAGPCAPG | | X | X | Q9H252 |
| 747 | 791 | LGPQFPSKGYSLLG | | X | X | Q9H252 |
| 748 | 792 | YSAAFLLSDQDESR | | X | X | Q9H252 |
| 749 | 793 | KDRTHNVTEKVTQV | | X | X | Q9NS40 |
| 750 | 794 | ENSTNDPEDSADTI | | X | X | Q9NS40 |
| 751 | 795 | GEKENSTNDPEDSA | | X | X | Q9NS40 |
| 752 | 796 | RECGYSCSPLNVVD | | X | X | Q9NS40 |
| 753 | 797 | YSEYGAAVLMLLMC | | X | X | Q9NS40 |
| 754 | 798 | SRPDVMQKPCTCDF | | X | X | Q9NS40 |
| 755 | 799 | GRRTLRPAVVG | | X | X | Q9NY47 |
| 756 | 800 | LDFLDAELEDE | | X | X | Q9NY47 |
| 757 | 801 | LDNHGYVFKPPHQD | | X | X | Q9NY47 |
| 758 | 802 | RTLRPAVVGVK | | X | X | Q9NY47 |
| 759 | 803 | RTLVKSLDERY | | X | X | Q9NY47 |
| 760 | 804 | TRRPTSGPPRP | | X | X | Q9NY47 |
| 761 | 805 | VTLDFLDAELEDEN | | X | X | Q9NY47 |
| 762 | 806 | REYCKDLNASDNNT | | X | X | Q9NY47 |
| 763 | 807 | LYGLIYHSWFQADP | | X | X | Q9NY47 |
| 764 | 808 | DFFYHPETQQYFFD | | X | X | Q9NZV8 |
| 765 | 809 | LIPEIIGDCCYEEY | | X | X | Q9NZV8 |
| 766 | 810 | RYPDTLLGSSERDF | | X | X | Q9NZV8 |
| 767 | 811 | VTMTTLGYGDMVPK | | X | X | Q9NZV8 |
| 768 | 812 | ANRSYSDEDQSSSN | | X | X | Q9P0X4 |
| 769 | 813 | DATPHTLVQPI | | X | X | Q9P0X4 |
| 770 | 814 | DNGIMGCHEIP | | X | X | Q9P0X4 |
| 771 | 815 | DRGEDEEEIDY | | X | X | Q9P0X4 |
| 772 | 816 | ELGKEEEEEEQ | | X | X | Q9P0X4 |
| 773 | 817 | FYHCLGVDTRN | | X | X | Q9P0X4 |
| 774 | 818 | GGAGGGGAGSE | | X | X | Q9P0X4 |
| 775 | 819 | GKFYHCLGVDT | | X | X | Q9P0X4 |
| 776 | 820 | GMHIFGCKFSL | | X | X | Q9P0X4 |
| 777 | 821 | GRGGAGGGGAGSEH | | X | X | Q9P0X4 |
| 778 | 822 | LFKGKFYHCLGVDT | | X | X | Q9P0X4 |
| 779 | 823 | NRVPSMRILVN | | X | X | Q9P0X4 |
| 780 | 824 | QEVQLAETEAF | | X | X | Q9P0X4 |
| 781 | 825 | QPIPATLASDP | | X | X | Q9P0X4 |
| 782 | 826 | RQATGSDTSLD | | X | X | Q9P0X4 |
| 783 | 827 | RQATGSDTSLDASP | | X | X | Q9P0X4 |
| 784 | 828 | SLRGLRAHQRS | | X | X | Q9P0X4 |
| 785 | 829 | SMRILVNLLLD | | X | X | Q9P0X4 |
| 786 | 830 | SPSSSAGSLQTTLE | | X | X | Q9P0X4 |
| 787 | 831 | TAVSPDPENFL | | X | X | Q9P0X4 |
| 788 | 832 | TGSDTSLDASPSSS | | X | X | Q9P0X4 |
| 789 | 833 | LVQPIPATLASDPA | | X | X | Q9P0X4 |
| 790 | 834 | PYARMPSYRYRRRR | | X | X | Q9UBN1 |
| 791 | 835 | RMPSYRYRRRRSRS | | X | X | Q9UBN1 |
| 792 | 836 | EWEVHGMPAVKNVI | | X | X | Q9UGM1 |
| 793 | 837 | LSDFIEDVEWE | | X | X | Q9UGM1 |
| 794 | 838 | VLNVTLQITLSQIK | | X | X | Q9UGM1 |
| 795 | 839 | VLYNKADDESSEPV | | X | X | Q9UGM1 |
| 796 | 840 | DESSEPV | | X | X | Q9UGM1 |
| 797 | 841 | LLLKRRSSFYIVN | | X | X | Q9UGM1 |
| 798 | 842 | TFGSWTYNGNQVD | | X | X | Q9UGM1 |
| 799 | 843 | AIRNGVNRNSAIIG | | X | X | Q9UHC6 |
| 800 | 844 | GDNSDYDYSALSCT | | X | X | Q9UIX4 |
| 801 | 845 | QPEDRRRRIIINVG | | X | X | Q9UIX4 |
| 802 | 846 | SDYDYSALSCTSDA | | X | X | Q9UIX4 |
| 803 | 847 | TREFGLLLLFLCVA | | X | X | Q9UIX4 |
| 804 | 848 | FHTFSRSYSELKEQ | | X | X | Q9UJ96 |
| 805 | 849 | RLRACRGHDDLLRV | | X | X | Q9UJ96 |
| 806 | 850 | RVCDDYDVSRDEFF | | X | X | Q9UJ96 |
| 807 | 851 | LGAGGGSAEVDTSS | | X | X | Q9ULD8 |
| 808 | 852 | PDLSPRVVDGIEDG | | X | X | Q9ULD8 |
| 809 | 853 | TAPRPRLGGRGRPG | | X | X | Q9ULD8 |
| 810 | 854 | SAMRSCDFGDGMKE | | X | X | Q9ULS6 |
| 811 | 855 | RSCDFGDGMKEVPS | | X | X | Q9ULS6 |
| 812 | 856 | ILKFQVQREVNSYL | | X | X | Q9UN88 |
| 813 | 857 | QPRRHRRPRRVIAR | | X | X | Q9UN88 |
| 814 | 858 | DLSPRIVDGIEDSG | | X | X | Q9UQ05 |
| 815 | 859 | IEDSGSTAEAPSFR | | X | X | Q9UQ05 |
| 816 | 860 | DKTLPSITEAESGA | | X | X | Q9UQ05 |
| 817 | 861 | ASPVGIKGFNTLPS | | X | X | Q9Y698 |
| 818 | 862 | LAVHMFIDRHK | | X | X | Q9Y698 |
| 819 | 863 | DASPVGIKGFNTLP | | X | X | Q9Y698 |
| 820 | 864 | AVNFNGSAGTPVTF | | | X | O00222 |
| 821 | 865 | CEGYNYQVDELSCE | | | X | O00222 |
| 822 | 866 | CSRDTYALEQSLTF | | | X | O00222 |
| 823 | 867 | ESGVEAFTQISREI | | | X | O00222 |
| 824 | 868 | FNGSAGTPVTFNEN | | | X | O00222 |
| 825 | 869 | GHFLWIGSDSWGSK | | | X | O00222 |
| 826 | 870 | IAQSQKIPREPRPG | | | X | O00222 |
| 827 | 871 | IFEQGKKSVTAPKF | | | X | O00222 |
| 828 | 872 | ILPKRASIDGFDRY | | | X | O00222 |
| 829 | 873 | KLIQKGNDRPNGEV | | | X | O00222 |
| 830 | 874 | KSVTAPKFISPASQ | | | X | O00222 |
| 831 | 875 | NNRRNVWFAEFWEE | | | X | O00222 |
| 832 | 876 | NQSGHFLWIGSDSW | | | X | O00222 |
| 833 | 877 | QGKKSVTAPKFISP | | | X | O00222 |
| 834 | 878 | RMSTIDGKELLGYI | | | X | O00222 |
| 835 | 879 | IDQINKDPDLLSNI | | | X | O00222 |
| 836 | 880 | QSAEKMYIQTTTLT | | | X | O00222 |
| 837 | 881 | AEVQSEIERIF | | | X | O00305 |
| 838 | 882 | AKRSVLNNPSK | | | X | O00305 |
| 839 | 883 | ISITRVTADISLAK | | | X | O00305 |
| 840 | 884 | RPSDSDVSLEE | | | X | O00305 |
| 841 | 885 | SEIERIFELAR | | | X | O00305 |
| 842 | 886 | SLAEVQSEIER | | | X | O00305 |
| 843 | 887 | YPLVEEDYPDSYQD | | | X | O00305 |
| 844 | 888 | AANQKLALQKAKEV | | | X | O00555 |
| 845 | 889 | AGGSGPPQQQQ | | | X | O00555 |
| 846 | 890 | AGGSGPPQQQQQQQ | | | X | O00555 |
| 847 | 891 | AKPLTRHMPQN | | | X | O00555 |
| 848 | 892 | ALEQHLPDDDKTPM | | | X | O00555 |
| 849 | 893 | ALYNEMDPDER | | | X | O00555 |
| 850 | 894 | ANAQELTKDEQEEE | | | X | O00555 |
| 851 | 895 | ARDREWKKYEFHYD | | | X | O00555 |
| 852 | 896 | ARGGEGEGEGP | | | X | O00555 |
| 853 | 897 | ARTMALYNPIPVRQ | | | X | O00555 |
| 854 | 898 | ASERSLGRYTDVDT | | | X | O00555 |
| 855 | 899 | ASREALYNEMDPDE | | | X | O00555 |
| 856 | 900 | AVDNLANAQEL | | | X | O00555 |
| 857 | 901 | DEDSDEDEFQI | | | X | O00555 |
| 858 | 902 | DEGTPPTNFDT | | | X | O00555 |
| 859 | 903 | DHHAREGSLEQPGF | | | X | O00555 |
| 860 | 904 | DPQENRNNNTN | | | X | O00555 |
| 861 | 905 | DRARDPSGSAGLDA | | | X | O00555 |
| 862 | 906 | EEEKKEEEEDD | | | X | O00555 |
| 863 | 907 | EEKKEEEEDDRGED | | | X | O00555 |
| 864 | 908 | EGPYGRESDHH | | | X | O00555 |
| 865 | 909 | EPYSESDDDWC | | | X | O00555 |
| 866 | 910 | EQDRTPLMFORMEP | | | X | O00555 |
| 867 | 911 | EQEEEEAANQK | | | X | O00555 |
| 868 | 912 | EQGPPTDMPNS | | | X | O00555 |
| 869 | 913 | EVAEVSPLSAA | | | X | O00555 |
| 870 | 914 | EVILAEDETDGEQR | | | X | O00555 |
| 871 | 915 | EVKARDREWKKYEF | | | X | O00555 |
| 872 | 916 | EYLTRDSSILG | | | X | O00555 |
| 873 | 917 | FDTFPAAIMTV | | | X | O00555 |
| 874 | 918 | FEKDCRGKYLL | | | X | O00555 |
| 875 | 919 | FEYLTRDSSIL | | | X | O00555 |
| 876 | 920 | FFIYAIIGMQV | | | X | O00555 |
| 877 | 921 | FLKLRRQQQIE | | | X | O00555 |
| 878 | 922 | FVAVIMDNFEY | | | X | O00555 |
| 879 | 923 | GALMAHESGLKESP | | | X | O00555 |
| 880 | 924 | GPPQQQQQQQQ | | | X | O00555 |
| 881 | 925 | GRESDHHAREG | | | X | O00555 |
| 882 | 926 | GSDYDEADGPG | | | X | O00555 |
| 883 | 927 | GSGPPQQQQQQ | | | X | O00555 |
| 884 | 928 | GSGVPVSGPNLSTT | | | X | O00555 |
| 885 | 929 | HHHHHHHHHHPPPP | | | X | O00555 |
| 886 | 930 | HHHHHHHPPPPDKD | | | X | O00555 |
| 887 | 931 | HHHHHHPPPPD | | | X | O00555 |
| 888 | 932 | HHHHPPPPDKD | | | X | O00555 |
| 889 | 933 | HHLDEYVRVWAEYD | | | X | O00555 |
| 890 | 934 | HYLPMEGQGRA | | | X | O00555 |
| 891 | 935 | IDVEDEDSDED | | | X | O00555 |
| 892 | 936 | IQQDLGRQDPP | | | X | O00555 |
| 893 | 937 | KDEQEEEEAAN | | | X | O00555 |
| 894 | 938 | KGGADKQQMDA | | | X | O00555 |
| 895 | 939 | KGGADKQQMDAELR | | | X | O00555 |
| 896 | 940 | KKEEEKKEEEE | | | X | O00555 |
| 897 | 941 | KPCDKNSGILT | | | X | O00555 |
| 898 | 942 | LAEDETDGEQR | | | X | O00555 |
| 899 | 943 | LFGNYTLLNVFLAI | | | X | O00555 |
| 900 | 944 | LGVLSGEFAKERER | | | X | O00555 |
| 901 | 945 | LIFAIIGLEFY | | | X | O00555 |
| 902 | 946 | LRALRLLRIFKVTK | | | X | O00555 |
| 903 | 947 | LRPLKTIKRLPKLK | | | X | O00555 |
| 904 | 948 | LSTTRPIQQDL | | | X | O00555 |
| 905 | 949 | LTKDEQEEEEA | | | X | O00555 |
| 906 | 950 | LTRDSSILGPH | | | X | O00555 |
| 907 | 951 | MAGAYDAPPPV | | | X | O00555 |
| 908 | 952 | NIGIDVEDEDSDED | | | X | O00555 |
| 909 | 953 | PLMFQRMEPPS | | | X | O00555 |
| 910 | 954 | PLPKKEEEKKEEEE | | | X | O00555 |
| 911 | 955 | PLSAANMSIAV | | | X | O00555 |
| 912 | 956 | PNAPRNNVLRYFDY | | | X | O00555 |
| 913 | 957 | PNSQSVEMREM | | | X | O00555 |
| 914 | 958 | PQQQQQQQQQQ | | | X | O00555 |
| 915 | 959 | PQQQQQQQQQQQQQ | | | X | O00555 |
| 916 | 960 | PTNFDTFPAAIMTV | | | X | O00555 |
| 917 | 961 | PYGRESDHHAR | | | X | O00555 |
| 918 | 962 | QILTGEDWNEVMYD | | | X | O00555 |
| 919 | 963 | QQQQQQQQQQA | | | X | O00555 |
| 920 | 964 | QQQQQQQQQQQ | | | X | O00555 |
| 921 | 965 | RDGYSDSEHYLPME | | | X | O00555 |
| 922 | 966 | RDRSHRASERS | | | X | O00555 |
| 923 | 967 | RMRFYIRRMVK | | | X | O00555 |
| 924 | 968 | RRMRFYIRRMVKTQ | | | X | O00555 |
| 925 | 969 | RRQQQIERELNGYM | | | X | O00555 |
| 926 | 970 | RTPLMFQRMEPPSP | | | X | O00555 |
| 927 | 971 | RYHDRARDPSGSAG | | | X | O00555 |
| 928 | 972 | SDSEHYLPMEG | | | X | O00555 |
| 929 | 973 | SEHYLPMEGQG | | | X | O00555 |
| 930 | 974 | SGKPCDKNSGILTR | | | X | O00555 |
| 931 | 975 | SGLKESPSWVT | | | X | O00555 |
| 932 | 976 | SGPPQQQQQQQQQQ | | | X | O00555 |
| 933 | 977 | SLFSLECVLKV | | | X | O00555 |
| 934 | 978 | SPEQGPPTDMP | | | X | O00555 |
| 935 | 979 | SPLSAANMSIAVKE | | | X | O00555 |
| 936 | 980 | STDPGPMLAIPAMA | | | X | O00555 |
| 937 | 981 | TGTWSPEQGPPTDM | | | X | O00555 |
| 938 | 982 | TRPYFHSSFNCFDC | | | X | O00555 |
| 939 | 983 | VEDEDSDEDEF | | | X | O00555 |
| 940 | 984 | VFQILTGEDWNEVM | | | X | O00555 |
| 941 | 985 | VIKPGTSFGISVLR | | | X | O00555 |
| 942 | 986 | WAEYDPAAWGRMPY | | | X | O00555 |
| 943 | 987 | YNPIPVRQNCLTVN | | | X | O00555 |
| 944 | 988 | YRGSDYDEADG | | | X | O00555 |
| 945 | 989 | YSDSEHYLPMEGQG | | | X | O00555 |
| 946 | 990 | DNFEYLTRDSSILG | | | X | O00555 |
| 947 | 991 | DGPGSGGGEEAMAG | | | X | O00555 |
| 948 | 992 | DPQENRNNNTNKSR | | | X | O00555 |
| 949 | 993 | EDSDEDEFQITEHN | | | X | O00555 |
| 950 | 994 | GIDVEDEDSDEDEF | | | X | O00555 |
| 951 | 995 | GNIGIDVEDEDSDE | | | X | O00555 |
| 952 | 996 | LMAHESGLKESPSW | | | X | O00555 |
| 953 | 997 | LVVDPQENRNNNTN | | | X | O00555 |
| 954 | 998 | MDNFEYLTRDSSIL | | | X | O00555 |
| 955 | 999 | NAQELTKDEQEEEE | | | X | O00555 |
| 956 | 1000 | PKKEEEKKEEEEDD | | | X | O00555 |
| 957 | 1001 | VEDEDSDEDEFQIT | | | X | O00555 |
| 958 | 1002 | GICFSFVFGALLEY | | | X | O00591 |
| 959 | 1003 | STVACDMDLAKYPM | | | X | O14764 |
| 960 | 1004 | DEQECMLDLESYGY | | | X | O14764 |
| 961 | 1005 | KKQKAKVKVSRPRA | | | X | O14764 |
| 962 | 1006 | TTELMNFKSAGQFP | | | X | O14764 |
| 963 | 1007 | KDNKGYCAQYRGEV | | | X | O15146 |
| 964 | 1008 | LYCCRRRKQWKNKK | | | X | O15146 |
| 965 | 1009 | QECSPGVVPTPIPI | | | X | O15146 |
| 966 | 1010 | ELLPGVRLGARLLD | | | X | O15303 |
| 967 | 1011 | SVIDYEEQRTVDPE | | | X | O15303 |
| 968 | 1012 | AREEAEPVFRAAEE | | | X | O15399 |
| 969 | 1013 | DLALLQFLGDDEIE | | | X | O15399 |
| 970 | 1014 | DNMAGVFYMLLVAM | | | X | O15399 |
| 971 | 1015 | ERSEIVDFSVPFVE | | | X | O15399 |
| 972 | 1016 | GGAGGPGGGLGGAR | | | X | O15399 |
| 973 | 1017 | IRLLFCAREEAEPV | | | X | O15399 |
| 974 | 1018 | LADGFHRYYGPIEP | | | X | O15399 |
| 975 | 1019 | LLGPGAGGAGGTGG | | | X | O15399 |
| 976 | 1020 | PGAGGAGGTGGAGG | | | X | O15399 |
| 977 | 1021 | PSPSDSEDSESLGG | | | X | O15399 |
| 978 | 1022 | PWWFADFPYPYAER | | | X | O15399 |
| 979 | 1023 | SQPLLGPGAGGAGG | | | X | O15399 |
| 980 | 1024 | SRYGRFLQPVDDTQ | | | X | O15399 |
| 981 | 1025 | SYTANLAAFMIQEE | | | X | O15399 |
| 982 | 1026 | TEQQLQVIFEVLEE | | | X | O15399 |
| 983 | 1027 | TQHLTVATLEERPF | | | X | O15399 |
| 984 | 1028 | ALLQFLGDDEIEML | | | X | O15399 |
| 985 | 1029 | GDDEIEMLERLWLS | | | X | O15399 |
| 986 | 1030 | GPGAGGAGGTGGAG | | | X | O15399 |
| 987 | 1031 | IDLALLQFLGDDEI | | | X | O15399 |
| 988 | 1032 | KKIDGVWNGMIGEV | | | X | O15399 |
| 989 | 1033 | PLLGPGAGGAGGTG | | | X | O15399 |
| 990 | 1034 | QFLGDDEIEMLERL | | | X | O15399 |
| 991 | 1035 | VWVMMFVMCLTVVA | | | X | O15399 |
| 992 | 1036 | NLFDTAEVYAAGKA | | | X | O43448 |
| 993 | 1037 | ANKSESEPDFF | | | X | O43497 |
| 994 | 1038 | AQRPLRRQAAIRTD | | | X | O43497 |
| 995 | 1039 | AWIAIFQVITLEGW | | | X | O43497 |
| 996 | 1040 | CVTLGMFRPCEDIA | | | X | O43497 |
| 997 | 1041 | DFFSPSLDGDGDRK | | | X | O43497 |
| 998 | 1042 | DGDRKKCLALVSLG | | | X | O43497 |
| 999 | 1043 | DRKNFDSLLWAIVT | | | X | O43497 |
| 1000 | 1044 | DSCPYCARAGAGEV | | | X | O43497 |
| 1001 | 1045 | DSKDPLASGPPDSM | | | X | O43497 |
| 1002 | 1046 | DTLPMLGNVLL | | | X | O43497 |
| 1003 | 1047 | EAELEAELELE | | | X | O43497 |
| 1004 | 1048 | ELTNALEISNIVFT | | | X | O43497 |
| 1005 | 1049 | ENFHKCRQHQEEEE | | | X | O43497 |
| 1006 | 1050 | EWELKLMDELA | | | X | O43497 |
| 1007 | 1051 | FAALGVELFGDLEC | | | X | O43497 |
| 1008 | 1052 | FIIFGILGVQLFKG | | | X | O43497 |
| 1009 | 1053 | FVLTAQFVLVN | | | X | O43497 |
| 1010 | 1054 | FYHADCHLEPV | | | X | O43497 |
| 1011 | 1055 | GAGEVELADREMPD | | | X | O43497 |
| 1012 | 1056 | GDLLPPGGQEE | | | X | O43497 |
| 1013 | 1057 | GERRSLLSGEG | | | X | O43497 |
| 1014 | 1058 | GGSDPQIPLAE | | | X | O43497 |
| 1015 | 1059 | GIMIAILVNTL | | | X | O43497 |
| 1016 | 1060 | GLDYEAYNSSSNTT | | | X | O43497 |
| 1017 | 1061 | GQESQDEEESSEEE | | | X | O43497 |
| 1018 | 1062 | HPTDRQLFDTISLL | | | X | O43497 |
| 1019 | 1063 | HSPLGSPFLWPGVE | | | X | O43497 |
| 1020 | 1064 | IPLAEMEALSL | | | X | O43497 |
| 1021 | 1065 | KEAKEEAELEAELE | | | X | O43497 |
| 1022 | 1066 | KKRRNLMLDDVIAS | | | X | O43497 |
| 1023 | 1067 | KLLKMAVGMRALLD | | | X | O43497 |
| 1024 | 1068 | KMAVGMRALLDTVM | | | X | O43497 |
| 1025 | 1069 | LARALRPDDPPLDG | | | X | O43497 |
| 1026 | 1070 | LDGDGDRKKCLALV | | | X | O43497 |
| 1027 | 1071 | LDYEAYNSSSN | | | X | O43497 |
| 1028 | 1072 | LKYLVYILRKAARR | | | X | O43497 |
| 1029 | 1073 | LMTFGNYVLFN | | | X | O43497 |
| 1030 | 1074 | LNIPPGPYSSM | | | X | O43497 |
| 1031 | 1075 | LPACCLERDSW | | | X | O43497 |
| 1032 | 1076 | LVHHHHHHHHHYHL | | | X | O43497 |
| 1033 | 1077 | LVTLLLDTLPM | | | X | O43497 |
| 1034 | 1078 | MDAHSFYNFIYFIL | | | X | O43497 |
| 1035 | 1079 | MFVGVVVENFHKCR | | | X | O43497 |
| 1036 | 1080 | MRILVTLLLDTLPM | | | X | O43497 |
| 1037 | 1081 | NYIFTAVFLAE | | | X | O43497 |
| 1038 | 1082 | PPETRSSLELD | | | X | O43497 |
| 1039 | 1083 | PQIPLAEMEAL | | | X | O43497 |
| 1040 | 1084 | PSGERRSLLSGEGQ | | | X | O43497 |
| 1041 | 1085 | PSLGGSDPQIPLAE | | | X | O43497 |
| 1042 | 1086 | QEDWNKVLYNG | | | X | O43497 |
| 1043 | 1087 | QSGSVLSVHSQPAD | | | X | O43497 |
| 1044 | 1088 | RARLPACCLERDSW | | | X | O43497 |
| 1045 | 1089 | RLEKKRRNLMLDDV | | | X | O43497 |
| 1046 | 1090 | RLRRLEKKRRNLML | | | X | O43497 |
| 1047 | 1091 | RLSVHHLVHHHHHH | | | X | O43497 |
| 1048 | 1092 | RQHQEEEEARRREE | | | X | O43497 |
| 1049 | 1093 | SLEWELKLMDE | | | X | O43497 |
| 1050 | 1094 | SPEIQDRDANGSRR | | | X | O43497 |
| 1051 | 1095 | SRFRLLVHHLC | | | X | O43497 |
| 1052 | 1096 | SVLSVHSQPAD | | | X | O43497 |
| 1053 | 1097 | VGSGKVYPTVH | | | X | O43497 |
| 1054 | 1098 | VIDILVSMVSDSGT | | | X | O43497 |
| 1055 | 1099 | VLYNGMASTSS | | | X | O43497 |
| 1056 | 1100 | WSAYIFPPQSR | | | X | O43497 |
| 1057 | 1101 | YEAYNSSSNTT | | | X | O43497 |
| 1058 | 1102 | ALGVELFGDLECDE | | | X | O43497 |
| 1059 | 1103 | ASGRLARALRPDDP | | | X | O43497 |
| 1060 | 1104 | DYEAYNSSSNTTCV | | | X | O43497 |
| 1061 | 1105 | FFVCQGEDTRNITN | | | X | O43497 |
| 1062 | 1106 | FGDLECDETHPCEG | | | X | O43497 |
| 1063 | 1107 | FILLIIVGSFFMIN | | | X | O43497 |
| 1064 | 1108 | GNVLLLCFFVFFIF | | | X | O43497 |
| 1065 | 1109 | KRLRRLEKKRRNLM | | | X | O43497 |
| 1066 | 1110 | LRAINRVPSMRILV | | | X | O43497 |
| 1067 | 1111 | NIGYAWIAIFQVIT | | | X | O43497 |
| 1068 | 1112 | PAPCPGPEPNWGKG | | | X | O43497 |
| 1069 | 1113 | RRREEKRLRRLEKK | | | X | O43497 |
| 1070 | 1114 | SETKQRESQLMREQ | | | X | O43497 |
| 1071 | 1115 | AAAGDEERKVGLAP | | | X | O43525 |
| 1072 | 1116 | DAIEESPSKEPKPV | | | X | O43525 |
| 1073 | 1117 | DRGYGNDFPIEDMI | | | X | O43525 |
| 1074 | 1118 | DTDPFTPSGSMPLS | | | X | O43525 |
| 1075 | 1119 | ELERSPSGFSISQD | | | X | O43525 |
| 1076 | 1120 | GDEERKVGLAPGDV | | | X | O43525 |
| 1077 | 1121 | GGGAANPAGGDAAA | | | X | O43525 |
| 1078 | 1122 | SITRDSDTPLSLMS | | | X | O43525 |
| 1079 | 1123 | TIICNYSETGPPEP | | | X | O43525 |
| 1080 | 1124 | DQSMMGKFVKVERQ | | | X | O43525 |
| 1081 | 1125 | EELERSPSGFSISQ | | | X | O43525 |
| 1082 | 1126 | EVDAQGEEMKEEFE | | | X | O43525 |
| 1083 | 1127 | HALVFLIVLGCLIL | | | X | O43525 |
| 1084 | 1128 | MMGKFVKVERQVQD | | | X | O43525 |
| 1085 | 1129 | RYKGWRGRLKFARK | | | X | O43525 |
| 1086 | 1130 | VRILQFRLYKKKFK | | | X | O43525 |
| 1087 | 1131 | DLHSTWQYYERTVT | | | X | O43526 |
| 1088 | 1132 | GEDIVDDKSCPCEF | | | X | O43526 |
| 1089 | 1133 | ARLPPYRYRFRRRS | | | X | O60359 |
| 1090 | 1134 | KESLHNNPANR | | | X | O60359 |
| 1091 | 1135 | TFARLPPYRYR | | | X | O60359 |
| 1092 | 1136 | FPEDADYEQDTAEY | | | X | O60359 |
| 1093 | 1137 | IDHFPEDADYEQDT | | | X | O60359 |
| 1094 | 1138 | YRYRFRRRSSSRST | | | X | O60359 |
| 1095 | 1139 | AEDTPFDFELYLVG | | | X | O60391 |
| 1096 | 1140 | AQVQPKRALLPAPV | | | X | O60391 |
| 1097 | 1141 | DLLERLAEDTPFDF | | | X | O60391 |
| 1098 | 1142 | EPSGPEVEQQQQQQ | | | X | O60391 |
| 1099 | 1143 | ERLAEDTPFDFELY | | | X | O60391 |
| 1100 | 1144 | FEELSGIHDPKLHH | | | X | O60391 |
| 1101 | 1145 | GEHAFFRLALPRIR | | | X | O60391 |
| 1102 | 1146 | GPEVEQQQQQQDQP | | | X | O60391 |
| 1103 | 1147 | KMVPCGKRVFAVTE | | | X | O60391 |
| 1104 | 1148 | LVRRGQLLAQLGDS | | | X | O60391 |
| 1105 | 1149 | NAFIMDKSLLDYEV | | | X | O60391 |
| 1106 | 1150 | QPKRALLPAPVNCG | | | X | O60391 |
| 1107 | 1151 | SYTANLAAVMVGDK | | | X | O60391 |
| 1108 | 1152 | TPFDFELYLVGDGK | | | X | O60391 |
| 1109 | 1153 | EGPVWLCSYGRPPA | | | X | O60391 |
| 1110 | 1154 | EGSKEETAEAEPSG | | | X | O60391 |
| 1111 | 1155 | EHPFVFARDPDEDG | | | X | O60391 |
| 1112 | 1156 | EPPEGSKEETAEAE | | | X | O60391 |
| 1113 | 1157 | LCQALVPPGVAALL | | | X | O60391 |
| 1114 | 1158 | LRKCCYGYCIDLLE | | | X | O60391 |
| 1115 | 1159 | QQQQQQDQPTAPEG | | | X | O60391 |
| 1116 | 1160 | TAGLPPGLLALGEV | | | X | O60391 |
| 1117 | 1161 | ENILNELNDPLREE | | | X | O60741 |
| 1118 | 1162 | ESSSVLNTDPDAEK | | | X | O60741 |
| 1119 | 1163 | GGGEEPAGGFEDAE | | | X | O60741 |
| 1120 | 1164 | GGGGGGGGGGGGEE | | | X | O60741 |
| 1121 | 1165 | IHPYSDFRFYWDLI | | | X | O60741 |
| 1122 | 1166 | KVDGGGGGGGGGGG | | | X | O60741 |
| 1123 | 1167 | LIMMVGNLVIIPVG | | | X | O60741 |
| 1124 | 1168 | LNDPLREEIVNFNC | | | X | O60741 |
| 1125 | 1169 | LYSLSVDNFNEVLE | | | X | O60741 |
| 1126 | 1170 | RTGTVNEDSSEIIL | | | X | O60741 |
| 1127 | 1171 | RYQGKIFDEENILN | | | X | O60741 |
| 1128 | 1172 | SLSHSNLHSPSPST | | | X | O60741 |
| 1129 | 1173 | SQPPQTQPQQPSPQ | | | X | O60741 |
| 1130 | 1174 | SVLNTDPDAEKPRF | | | X | O60741 |
| 1131 | 1175 | TAGFWIIHPYSDFR | | | X | O60741 |
| 1132 | 1176 | TATSLSHSNLHSPS | | | X | O60741 |
| 1133 | 1177 | YPMMRRAFETVAID | | | X | O60741 |
| 1134 | 1178 | DGGGGGGGGGGGGE | | | X | O60741 |
| 1135 | 1179 | EGGGKPNSSSNSRD | | | X | O60741 |
| 1136 | 1180 | FKVDGGGGGGGGGG | | | X | O60741 |
| 1137 | 1181 | FRTGTVNEDSSEII | | | X | O60741 |
| 1138 | 1182 | GGGGGGGGGGEEPA | | | X | O60741 |
| 1139 | 1183 | IFDEENILNELNDP | | | X | O60741 |
| 1140 | 1184 | QGKIFDEENILNEL | | | X | O60741 |
| 1141 | 1185 | QSQPPQTQPQQPSP | | | X | O60741 |
| 1142 | 1186 | SVCFKVDGGGGGGG | | | X | O60741 |
| 1143 | 1187 | ADMEEEEEEEE | | | X | O60840 |
| 1144 | 1188 | ALGVYIPFPED | | | X | O60840 |
| 1145 | 1189 | ALTCDTEEEEE | | | X | O60840 |
| 1146 | 1190 | ASLPASDTGSM | | | X | O60840 |
| 1147 | 1191 | CKRLVAMNMPL | | | X | O60840 |
| 1148 | 1192 | CVALGVYIPFPEDD | | | X | O60840 |
| 1149 | 1193 | DEDEEEGALAS | | | X | O60840 |
| 1150 | 1194 | DEFKRIWSEYD | | | X | O60840 |
| 1151 | 1195 | DEVIPPPDEEEVTV | | | X | O60840 |
| 1152 | 1196 | DTEEEEEEGQE | | | X | O60840 |
| 1153 | 1197 | DWITQAEELDMEDP | | | X | O60840 |
| 1154 | 1198 | DYAFTSIFTVE | | | X | O60840 |
| 1155 | 1199 | EDEEVPDRLSY | | | X | O60840 |
| 1156 | 1200 | EEEEEEEEEEEEGA | | | X | O60840 |
| 1157 | 1201 | EEEEEEEEEEG | | | X | O60840 |
| 1158 | 1202 | EEEEEEEEGAG | | | X | O60840 |
| 1159 | 1203 | EEEEGQEGVEE | | | X | O60840 |
| 1160 | 1204 | EEEEGQEGVEEEDE | | | X | O60840 |
| 1161 | 1205 | EEGQEGVEEED | | | X | O60840 |
| 1162 | 1206 | EEVPDRLSYLD | | | X | O60840 |
| 1163 | 1207 | EGADMEEEEEE | | | X | O60840 |
| 1164 | 1208 | ELDKNQRQCVEYAL | | | X | O60840 |
| 1165 | 1209 | EPSPANGAGPGPEW | | | X | O60840 |
| 1166 | 1210 | EQVEYVFLVIF | | | X | O60840 |
| 1167 | 1211 | ESILSRFDEED | | | X | O60840 |
| 1168 | 1212 | ETQGDEDEEEG | | | X | O60840 |
| 1169 | 1213 | EVIPPPDEEEV | | | X | O60840 |
| 1170 | 1214 | FACIGVQLFKGKFY | | | X | O60840 |
| 1171 | 1215 | FDNFFFAMLTVFQC | | | X | O60840 |
| 1172 | 1216 | FDYAFTSIFTVEIL | | | X | O60840 |
| 1173 | 1217 | GILETTLVEVG | | | X | O60840 |
| 1174 | 1218 | GSIVDIAVTEVNNG | | | X | O60840 |
| 1175 | 1219 | GVYIPFPEDDS | | | X | O60840 |
| 1176 | 1220 | GYLDWITQAEELDM | | | X | O60840 |
| 1177 | 1221 | IMKTRVCRRLR | | | X | O60840 |
| 1178 | 1222 | IPPPDEEEVTV | | | X | O60840 |
| 1179 | 1223 | ITQAEELDMED | | | X | O60840 |
| 1180 | 1224 | KIKTEGNLEQA | | | X | O60840 |
| 1181 | 1225 | KLLDEVIPPPDEEE | | | X | O60840 |
| 1182 | 1226 | KQEIADACRLT | | | X | O60840 |
| 1183 | 1227 | KQQMEEDLRGYLDW | | | X | O60840 |
| 1184 | 1228 | KRLVAMNMPLN | | | X | O60840 |
| 1185 | 1229 | LGSDMEAEEDP | | | X | O60840 |
| 1186 | 1230 | LISFGIHSSAISVV | | | X | O60840 |
| 1187 | 1231 | LLVLFVIIIYAIIG | | | X | O60840 |
| 1188 | 1232 | LRIVIKKIWKR | | | X | O60840 |
| 1189 | 1233 | MALFTVSTFEG | | | X | O60840 |
| 1190 | 1234 | MEEEEEEEEEE | | | X | O60840 |
| 1191 | 1235 | MLCAFLIINLFVAV | | | X | O60840 |
| 1192 | 1236 | MSESEGGKDTTPEP | | | X | O60840 |
| 1193 | 1237 | MTETQGDEDEE | | | X | O60840 |
| 1194 | 1238 | NATLFALVRTS | | | X | O60840 |
| 1195 | 1239 | NLEQVEYVFLV | | | X | O60840 |
| 1196 | 1240 | PFPEDDSNTAN | | | X | O60840 |
| 1197 | 1241 | QAEELDMEDPS | | | X | O60840 |
| 1198 | 1242 | QDAMGYELPWV | | | X | O60840 |
| 1199 | 1243 | QGTSSLYSDEE | | | X | O60840 |
| 1200 | 1244 | QYRVWATVNSA | | | X | O60840 |
| 1201 | 1245 | RLTLDEMDNAASDL | | | X | O60840 |
| 1202 | 1246 | RNNNFQTFPQAVLL | | | X | O60840 |
| 1203 | 1247 | RREGADMEEEE | | | X | O60840 |
| 1204 | 1248 | RREGADMEEEEEEE | | | X | O60840 |
| 1205 | 1249 | RVCRRLRRANR | | | X | O60840 |
| 1206 | 1250 | SHASLPASDTGSMT | | | X | O60840 |
| 1207 | 1251 | SLPASDTGSMTETQ | | | X | O60840 |
| 1208 | 1252 | STSSHASLPASDTG | | | X | O60840 |
| 1209 | 1253 | TFEGWPALLYKAID | | | X | O60840 |
| 1210 | 1254 | TGSMTETQGDEDEE | | | X | O60840 |
| 1211 | 1255 | TNRRRGRLRWF | | | X | O60840 |
| 1212 | 1256 | TQAEELDMEDPSAD | | | X | O60840 |
| 1213 | 1257 | TSSLYSDEESILSR | | | X | O60840 |
| 1214 | 1258 | VASAQRSPRAL | | | X | O60840 |
| 1215 | 1259 | VEYVFLVIFTVETV | | | X | O60840 |
| 1216 | 1260 | VVPKEKVVPIP | | | X | O60840 |
| 1217 | 1261 | WATPPQRGRLL | | | X | O60840 |
| 1218 | 1262 | YFLGSDMEAEE | | | X | O60840 |
| 1219 | 1263 | YIPFPEDDSNT | | | X | O60840 |
| 1220 | 1264 | YLDWITQAEEL | | | X | O60840 |
| 1221 | 1265 | YLGRSSGPLRT | | | X | O60840 |
| 1222 | 1266 | YVFLVIFTVET | | | X | O60840 |
| 1223 | 1267 | ARREGADMEEEEEE | | | X | O60840 |
| 1224 | 1268 | DMEEEEEEEEEEEE | | | X | O60840 |
| 1225 | 1269 | DTEEEEEEGQEGVE | | | X | O60840 |
| 1226 | 1270 | EEEEEEE | | | X | O60840 |
| 1227 | 1271 | EEEEEEEEEEEEEG | | | X | O60840 |
| 1228 | 1272 | EEEEEEEEEEGAGG | | | X | O60840 |
| 1229 | 1273 | EEEEEEEGAGGVEL | | | X | O60840 |
| 1230 | 1274 | EEEEEGQEGVEEED | | | X | O60840 |
| 1231 | 1275 | EEGQEGVEEEDEKD | | | X | O60840 |
| 1232 | 1276 | EGADMEEEEEEEEE | | | X | O60840 |
| 1233 | 1277 | FDEEDLGDEMACVH | | | X | O60840 |
| 1234 | 1278 | FYATFLIQDYFRKF | | | X | O60840 |
| 1235 | 1279 | LDWITQAEELDMED | | | X | O60840 |
| 1236 | 1280 | LTCDTEEEEEEGQE | | | X | O60840 |
| 1237 | 1281 | NTFDALIVVGSIVD | | | X | O60840 |
| 1238 | 1282 | QCLQRQGSCEDLPI | | | X | O60840 |
| 1239 | 1283 | RIVIKKIWKRMKQK | | | X | O60840 |
| 1240 | 1284 | RLRRANRVLRARCR | | | X | O60840 |
| 1241 | 1285 | RQALTCDTEEEEEE | | | X | O60840 |
| 1242 | 1286 | SDEESILSRFDEED | | | X | O60840 |
| 1243 | 1287 | VYIPFPEDDSNTAN | | | X | O60840 |
| 1244 | 1288 | CDGDNDCEDDSDEQ | | | X | O75096 |
| 1245 | 1289 | CDGDNDCGDHSDED | | | X | O75096 |
| 1246 | 1290 | DDDCGDWSDESDCS | | | X | O75096 |
| 1247 | 1291 | DNDCEDDSDEQDCP | | | X | O75096 |
| 1248 | 1292 | DNDCGDHSDEDGCI | | | X | O75096 |
| 1249 | 1293 | KKEGGPDHNYTKEK | | | X | O75096 |
| 1250 | 1294 | NLDGSERKVLINTD | | | X | O75096 |
| 1251 | 1295 | GPGTLHTIDNATTN | | | X | O94759 |
| 1252 | 1296 | KYVRVSQDTPSSVI | | | X | O94759 |
| 1253 | 1297 | LENGVQLKEFVTWD | | | X | O94759 |
| 1254 | 1298 | LEPLSTIQYNVVDG | | | X | O94759 |
| 1255 | 1299 | LSTIQYNVVDGLRD | | | X | O94759 |
| 1256 | 1300 | VCEEMRQLFYDPDE | | | X | O94759 |
| 1257 | 1301 | ADEEQRVPYPALAA | | | X | O95180 |
| 1258 | 1302 | ADGGLSVLRTF | | | X | O95180 |
| 1259 | 1303 | AELDAEIELEM | | | X | O95180 |
| 1260 | 1304 | AGTPLGSVASV | | | X | O95180 |
| 1261 | 1305 | AIVLLSLMGITLEE | | | X | O95180 |
| 1262 | 1306 | AIVPLEPPESEPPM | | | X | O95180 |
| 1263 | 1307 | APHPRPLQEVE | | | X | O95180 |
| 1264 | 1308 | ASAPHPRPLQE | | | X | O95180 |
| 1265 | 1309 | ATGMRALLDTV | | | X | O95180 |
| 1266 | 1310 | ATGMRALLDTVVQA | | | X | O95180 |
| 1267 | 1311 | CEGPDTRNISTKAQ | | | X | O95180 |
| 1268 | 1312 | CGERESLLSGE | | | X | O95180 |
| 1269 | 1313 | CTLLMLFIFIFSIL | | | X | O95180 |
| 1270 | 1314 | DAELDAEIELEMAQ | | | X | O95180 |
| 1271 | 1315 | DEDKTSVHFEEDFH | | | X | O95180 |
| 1272 | 1316 | DKTSVHFEEDF | | | X | O95180 |
| 1273 | 1317 | DLFITFIICVN | | | X | O95180 |
| 1274 | 1318 | DLGVPSGDPFL | | | X | O95180 |
| 1275 | 1319 | DPAEPGEKTPV | | | X | O95180 |
| 1276 | 1320 | EAEASDPADEE | | | X | O95180 |
| 1277 | 1321 | EDAAELDDDSEDSC | | | X | O95180 |
| 1278 | 1322 | EGSGAGGDPAA | | | X | O95180 |
| 1279 | 1323 | EPPESEPPMPV | | | X | O95180 |
| 1280 | 1324 | EPTEGSGAGGDPAA | | | X | O95180 |
| 1281 | 1325 | ERRRRSTFPSP | | | X | O95180 |
| 1282 | 1326 | ERVFLSVSNYIFTA | | | X | O95180 |
| 1283 | 1327 | EVEMETYGAGT | | | X | O95180 |
| 1284 | 1328 | FFLRIDSHREDAAE | | | X | O95180 |
| 1285 | 1329 | FGILGVQLFKGKFY | | | X | O95180 |
| 1286 | 1330 | FIFLNCVTIALERP | | | X | O95180 |
| 1287 | 1331 | FLRPYYQTEEGEEN | | | X | O95180 |
| 1288 | 1332 | FVTFVLVAQFVLVN | | | X | O95180 |
| 1289 | 1333 | GAIVPLEPPES | | | X | O95180 |
| 1290 | 1334 | GEENPFICSSR | | | X | O95180 |
| 1291 | 1335 | GIMMAILVNTL | | | X | O95180 |
| 1292 | 1336 | GSELGVSPSESPAA | | | X | O95180 |
| 1293 | 1337 | HADCHIEGPQERAR | | | X | O95180 |
| 1294 | 1338 | HNGAINFDNIGYAW | | | X | O95180 |
| 1295 | 1339 | ILGMHLFGCKFSLK | | | X | O95180 |
| 1296 | 1340 | KRLRRLERRRR | | | X | O95180 |
| 1297 | 1341 | KTSVHFEEDFHKLR | | | X | O95180 |
| 1298 | 1342 | LDPAEPGEKTPVRP | | | X | O95180 |
| 1299 | 1343 | LGVQLFKGKFYYCE | | | X | O95180 |
| 1300 | 1344 | LQSSWNLLDGLLVL | | | X | O95180 |
| 1301 | 1345 | LSPPLIMCTAATPM | | | X | O95180 |
| 1302 | 1346 | LSPRGTARSPS | | | X | O95180 |
| 1303 | 1347 | MCTAATPMPTP | | | X | O95180 |
| 1304 | 1348 | MFALEMLLKLLACG | | | X | O95180 |
| 1305 | 1349 | MGRLWVTFSGKLRR | | | X | O95180 |
| 1306 | 1350 | MHLFGCKFSLKTDT | | | X | O95180 |
| 1307 | 1351 | PAESCASLQIPLAV | | | X | O95180 |
| 1308 | 1352 | PASAPHPRPLQEVE | | | X | O95180 |
| 1309 | 1353 | PEAEPALGARRKKK | | | X | O95180 |
| 1310 | 1354 | PEPGACDTRLVRAG | | | X | O95180 |
| 1311 | 1355 | PLEPPESEPPMPVG | | | X | O95180 |
| 1312 | 1356 | PLIMCTAATPMPTP | | | X | O95180 |
| 1313 | 1357 | PSPGRGPPDAE | | | X | O95180 |
| 1314 | 1358 | QESPGARDAPNLVA | | | X | O95180 |
| 1315 | 1359 | QVVALPSDFFL | | | X | O95180 |
| 1316 | 1360 | RASSSGAIVPLEPP | | | X | O95180 |
| 1317 | 1361 | SAVQGQGPGHRQRR | | | X | O95180 |
| 1318 | 1362 | SCASLQIPLAVSSP | | | X | O95180 |
| 1319 | 1363 | SHREDAAELDDDSE | | | X | O95180 |
| 1320 | 1364 | SLQIPLAVSSPARS | | | X | O95180 |
| 1321 | 1365 | SNPHNGAINFDNIG | | | X | O95180 |
| 1322 | 1366 | SPPSPGRGPPD | | | X | O95180 |
| 1323 | 1367 | TLGMFRPCEDV | | | X | O95180 |
| 1324 | 1368 | TRNISTKAQCR | | | X | O95180 |
| 1325 | 1369 | VALMTFGNYVL | | | X | O95180 |
| 1326 | 1370 | YTQPQAEGVGAARN | | | X | O95180 |
| 1327 | 1371 | AAELDDDSEDSCCL | | | X | O95180 |
| 1328 | 1372 | AGRHTASVHHLVYH | | | X | O95180 |
| 1329 | 1373 | APGEPGWMGRLWVT | | | X | O95180 |
| 1330 | 1374 | AYTQPQAEGVGAAR | | | X | O95180 |
| 1331 | 1375 | CKFSLKTDTGDTVP | | | X | O95180 |
| 1332 | 1376 | CSSRRDNGMQKCSH | | | X | O95180 |
| 1333 | 1377 | GMHLFGCKFSLKTD | | | X | O95180 |
| 1334 | 1378 | GPEAEPALGARRKK | | | X | O95180 |
| 1335 | 1379 | LDLGVPSGDPFLDG | | | X | O95180 |
| 1336 | 1380 | LLKMATGMRALLDT | | | X | O95180 |
| 1337 | 1381 | PDSRRGSSSSGDPP | | | X | O95180 |
| 1338 | 1382 | QRCVSSRPAAPGGE | | | X | O95180 |
| 1339 | 1383 | QSRWRKKVDPSAVQ | | | X | O95180 |
| 1340 | 1384 | SATPAPGGGADDPV | | | X | O95180 |
| 1341 | 1385 | TFGQRCVSSRPAAP | | | X | O95180 |
| 1342 | 1386 | TILPSGVGSGKGST | | | X | O95180 |
| 1343 | 1387 | VPLEPPESEPPMPV | | | X | O95180 |
| 1344 | 1388 | WNRLDFFIVVAGMM | | | X | O95180 |
| 1345 | 1389 | YHHHHHHHHHYHFS | | | X | O95180 |
| 1346 | 1390 | FLENIVRRSNDTNF | | | X | O95259 |
| 1347 | 1391 | PYDVINAFENVDEV | | | X | O95259 |
| 1348 | 1392 | AYFLCLLSALLLTE | | | X | O95970 |
| 1349 | 1393 | DHILLGVFMLV | | | X | P02708 |
| 1350 | 1394 | DQESNNAAAEW | | | X | P02708 |
| 1351 | 1395 | EIIVTHFPFDE | | | X | P02708 |
| 1352 | 1396 | ETMKSDQESNNAAA | | | X | P02708 |
| 1353 | 1397 | GLVLGSEHETR | | | X | P02708 |
| 1354 | 1398 | GSVVAINPESDQPD | | | X | P02708 |
| 1355 | 1399 | KSDQESNNAAA | | | X | P02708 |
| 1356 | 1400 | KVLLQYTGHIT | | | X | P02708 |
| 1357 | 1401 | LVLYNNADGDFAIV | | | X | P02708 |
| 1358 | 1402 | NVIIPCLLFSF | | | X | P02708 |
| 1359 | 1403 | QDKKIFTEDID | | | X | P02708 |
| 1360 | 1404 | QLIQLINVDEV | | | X | P02708 |
| 1361 | 1405 | RPVEDHRQVVE | | | X | P02708 |
| 1362 | 1406 | SAGLVLGSEHE | | | X | P02708 |
| 1363 | 1407 | SIIITVIVINTHHR | | | X | P02708 |
| 1364 | 1408 | SYCEIIVTHFPFDE | | | X | P02708 |
| 1365 | 1409 | VFVIASIIITV | | | X | P02708 |
| 1366 | 1410 | VINTHHRSPST | | | X | P02708 |
| 1367 | 1411 | VNVIIPCLLFSFLT | | | X | P02708 |
| 1368 | 1412 | VPLFSHLQNEQ | | | X | P02708 |
| 1369 | 1413 | YNNADGDFAIVKFT | | | X | P02708 |
| 1370 | 1414 | CCPDTPYLDITYH | | | X | P02708 |
| 1371 | 1415 | CPDTPYLDITYHF | | | X | P02708 |
| 1372 | 1416 | FLLVIVE | | | X | P02708 |
| 1373 | 1417 | GLQLIQLINVDEV | | | X | P02708 |
| 1374 | 1418 | GSVVAINPESDQP | | | X | P02708 |
| 1375 | 1419 | HSVTYSCCPDTPY | | | X | P02708 |
| 1376 | 1420 | INVDEVNQIVTTN | | | X | P02708 |
| 1377 | 1421 | KRPSREKQDKKIF | | | X | P02708 |
| 1378 | 1422 | LQLIQLINVDEVN | | | X | P02708 |
| 1379 | 1423 | LSNFMESGEWVIK | | | X | P02708 |
| 1380 | 1424 | NVDEVNQIVTTNV | | | X | P02708 |
| 1381 | 1425 | NVIIPCLLFSFLT | | | X | P02708 |
| 1382 | 1426 | PDTPYLDITY | | | X | P02708 |
| 1383 | 1427 | SCCPDTPYLDITY | | | X | P02708 |
| 1384 | 1428 | SVVAINPESDQPD | | | X | P02708 |
| 1385 | 1429 | TYSCCPDTPYLDI | | | X | P02708 |
| 1386 | 1430 | VCIIGTLAVFAGR | | | X | P02708 |
| 1387 | 1431 | VTYSCCPDTPYLD | | | X | P02708 |
| 1388 | 1432 | YSCCPDTPYLDIT | | | X | P02708 |
| 1389 | 1433 | AAAAPLLVAVAALL | | | X | P06213 |
| 1390 | 1434 | APESEELEMEFEDM | | | X | P06213 |
| 1391 | 1435 | CSISVTYFPFD | | | X | P07510 |
| 1392 | 1436 | DGQTIEWIFID | | | X | P07510 |
| 1393 | 1437 | DPNLRPAERDS | | | X | P07510 |
| 1394 | 1438 | EERLLADLMQN | | | X | P07510 |
| 1395 | 1439 | FDNGNEEWFLV | | | X | P07510 |
| 1396 | 1440 | IFQSQTYSTNEIDL | | | X | P07510 |
| 1397 | 1441 | KMLLDPAAPAQ | | | X | P07510 |
| 1398 | 1442 | LAVCLGAQGRNQEE | | | X | P07510 |
| 1399 | 1443 | LGAQGRNQEER | | | X | P07510 |
| 1400 | 1444 | LLDPAAPAQEA | | | X | P07510 |
| 1401 | 1445 | LSQEDGQTIEW | | | X | P07510 |
| 1402 | 1446 | LTNLISLNEREEAL | | | X | P07510 |
| 1403 | 1447 | NQEERLLADLM | | | X | P07510 |
| 1404 | 1448 | NRVPALPFPGD | | | X | P07510 |
| 1405 | 1449 | NYDPNLRPAER | | | X | P07510 |
| 1406 | 1450 | PAKMLLDPAAP | | | X | P07510 |
| 1407 | 1451 | PDIVLENNVDG | | | X | P07510 |
| 1408 | 1452 | PDIVLENNVDGVFE | | | X | P07510 |
| 1409 | 1453 | QTIEWIFIDPE | | | X | P07510 |
| 1410 | 1454 | RHQQSHFDNGNEEW | | | X | P07510 |
| 1411 | 1455 | SHFDNGNEEWF | | | X | P07510 |
| 1412 | 1456 | SKYLTFLLVVT | | | X | P07510 |
| 1413 | 1457 | SQTYSTNEIDL | | | X | P07510 |
| 1414 | 1458 | VDGVFEVALYC | | | X | P07510 |
| 1415 | 1459 | VPALPFPGDPR | | | X | P07510 |
| 1416 | 1460 | VWRPDIVLENNVDG | | | X | P07510 |
| 1417 | 1461 | AALEKLE | | | X | P07510 |
| 1418 | 1462 | DIVLENNVDGVFE | | | X | P07510 |
| 1419 | 1463 | ETSQAVP | | | X | P07510 |
| 1420 | 1464 | FQSQTYSTNEIDL | | | X | P07510 |
| 1421 | 1465 | HFDNGNEEWFLVG | | | X | P07510 |
| 1422 | 1466 | HYNRVPALPFPGD | | | X | P07510 |
| 1423 | 1467 | LLLAVCLGAQGRN | | | X | P07510 |
| 1424 | 1468 | LQLSQEDGQTIEW | | | X | P07510 |
| 1425 | 1469 | LSLFICG | | | X | P07510 |
| 1426 | 1470 | LVAKKVPETSQAV | | | X | P07510 |
| 1427 | 1471 | QWQRQGLVAAALE | | | X | P07510 |
| 1428 | 1472 | RQGLVAAALEKLE | | | X | P07510 |
| 1429 | 1473 | STNEIDL | | | X | P07510 |
| 1430 | 1474 | TIEWIFIDPEAFT | | | X | P07510 |
| 1431 | 1475 | VLENNVDGVFEVA | | | X | P07510 |
| 1432 | 1476 | VVNAVVV | | | X | P07510 |
| 1433 | 1477 | WQRQGLVAAALEK | | | X | P07510 |
| 1434 | 1478 | APDHDVTQERDEVW | | | X | P07550 |
| 1435 | 1479 | CYANETCCDFF | | | X | P07550 |
| 1436 | 1480 | DSQGRNCSTNDSLL | | | X | P07550 |
| 1437 | 1481 | FAITSPFKYQSLLT | | | X | P07550 |
| 1438 | 1482 | NFWCEFWTSIDVLC | | | X | P07550 |
| 1439 | 1483 | NGYSSNGNTGEQSG | | | X | P07550 |
| 1440 | 1484 | QEKENKLLCEDLPG | | | X | P07550 |
| 1441 | 1485 | QGRNCSTNDSL | | | X | P07550 |
| 1442 | 1486 | CLKEHKALKTLGI | | | X | P07550 |
| 1443 | 1487 | DNIDSQGRNCSTN | | | X | P07550 |
| 1444 | 1488 | DSQGRNCSTNDSL | | | X | P07550 |
| 1445 | 1489 | FCLKEHKALKTLG | | | X | P07550 |
| 1446 | 1490 | GRNCSTN | | | X | P07550 |
| 1447 | 1491 | IASSIVS | | | X | P07550 |
| 1448 | 1492 | NCSTNDS | | | X | P07550 |
| 1449 | 1493 | RNCSTND | | | X | P07550 |
| 1450 | 1494 | SLLTKNKARVIIL | | | X | P07550 |
| 1451 | 1495 | TVPSDNI | | | X | P07550 |
| 1452 | 1496 | VLAIVFG | | | X | P07550 |
| 1453 | 1497 | YQSLLTK | | | X | P07550 |
| 1454 | 1498 | AIAAFYLPVIIMTV | | | X | P08172 |
| 1455 | 1499 | APRDPVTENCV | | | X | P08172 |
| 1456 | 1500 | CAPCIPNTVWT | | | X | P08172 |
| 1457 | 1501 | DSCTPTNTTVE | | | X | P08172 |
| 1458 | 1502 | GRIVKPNNNNMPSS | | | X | P08172 |
| 1459 | 1503 | INTFCAPCIPNTVW | | | X | P08172 |
| 1460 | 1504 | ISFDRYFCVTKPLT | | | X | P08172 |
| 1461 | 1505 | IVKPNNNNMPSSDD | | | X | P08172 |
| 1462 | 1506 | KQNIVARKIVKMTK | | | X | P08172 |
| 1463 | 1507 | KVNRHLQTVNN | | | X | P08172 |
| 1464 | 1508 | LFWQFIVGVRTVED | | | X | P08172 |
| 1465 | 1509 | LIISFDRYFCV | | | X | P08172 |
| 1466 | 1510 | LVQGRIVKPNNNNM | | | X | P08172 |
| 1467 | 1511 | MNNSTNSSNNSLAL | | | X | P08172 |
| 1468 | 1512 | MVSIKVNRHLQTVN | | | X | P08172 |
| 1469 | 1513 | NSTNSSNNSLA | | | X | P08172 |
| 1470 | 1514 | PAILFWQFIVG | | | X | P08172 |
| 1471 | 1515 | PCIPNTVWTIG | | | X | P08172 |
| 1472 | 1516 | PVTENCVQGEE | | | X | P08172 |
| 1473 | 1517 | QFIVGVRTVED | | | X | P08172 |
| 1474 | 1518 | QGRIVKPNNNNMPS | | | X | P08172 |
| 1475 | 1519 | QNIVARKIVKMTKQ | | | X | P08172 |
| 1476 | 1520 | SRIKKDKKEPV | | | X | P08172 |
| 1477 | 1521 | SVMNLLIISFD | | | X | P08172 |
| 1478 | 1522 | TENCVQGEEKE | | | X | P08172 |
| 1479 | 1523 | TENCVQGEEKESSN | | | X | P08172 |
| 1480 | 1524 | TFCAPCIPNTVWTI | | | X | P08172 |
| 1481 | 1525 | TPKSDSCTPTNTTV | | | X | P08172 |
| 1482 | 1526 | TVEVVGSSGQNGDE | | | X | P08172 |
| 1483 | 1527 | VCDLWLALDYV | | | X | P08172 |
| 1484 | 1528 | VLVAGSLSLVTIIG | | | X | P08172 |
| 1485 | 1529 | VSIKVNRHLQTVNN | | | X | P08172 |
| 1486 | 1530 | WPLGPVVCDLW | | | X | P08172 |
| 1487 | 1531 | IVKMTKQPAKKKP | | | X | P08172 |
| 1488 | 1532 | KIVKMTKQPAKKK | | | X | P08172 |
| 1489 | 1533 | LFWQFIVGVRTVE | | | X | P08172 |
| 1490 | 1534 | NNNNMPSSDDGLE | | | X | P08172 |
| 1491 | 1535 | NNSTNSS | | | X | P08172 |
| 1492 | 1536 | NSTNSSN | | | X | P08172 |
| 1493 | 1537 | NSTNSSNNSLALT | | | X | P08172 |
| 1494 | 1538 | RKIVKMTKQPAKK | | | X | P08172 |
| 1495 | 1539 | SRASKSRIKKDKK | | | X | P08172 |
| 1496 | 1540 | STNSSNNSLALTS | | | X | P08172 |
| 1497 | 1541 | TNSSNNS | | | X | P08172 |
| 1498 | 1542 | VKPNNNNMPSSDD | | | X | P08172 |
| 1499 | 1543 | WTIGYWL | | | X | P08172 |
| 1500 | 1544 | YINSTIN | | | X | P08172 |
| 1501 | 1545 | AFYLPVVIMTV | | | X | P08173 |
| 1502 | 1546 | AKTLAFLKSPL | | | X | P08173 |
| 1503 | 1547 | EATTPAMPAPP | | | X | P08173 |
| 1504 | 1548 | EMVFIATVTGS | | | X | P08173 |
| 1505 | 1549 | ETVEMVFIATVTGS | | | X | P08173 |
| 1506 | 1550 | LSIKVNRQLQTVNN | | | X | P08173 |
| 1507 | 1551 | LSTTEATTPAMPAP | | | X | P08173 |
| 1508 | 1552 | NRYETVEMVFIATV | | | X | P08173 |
| 1509 | 1553 | TVEMVFIATVT | | | X | P08173 |
| 1510 | 1554 | VNRQLQTVNNY | | | X | P08173 |
| 1511 | 1555 | WTPYNVMVLVN | | | X | P08173 |
| 1512 | 1556 | AKTLAFL | | | X | P08173 |
| 1513 | 1557 | DKDTSNE | | | X | P08173 |
| 1514 | 1558 | KDTSNES | | | X | P08173 |
| 1515 | 1559 | LYTVYIIKGYWPL | | | X | P08173 |
| 1516 | 1560 | RNQVRKKRQMAAR | | | X | P08173 |
| 1517 | 1561 | RYETVEMVFIATV | | | X | P08173 |
| 1518 | 1562 | SATQNTK | | | X | P08173 |
| 1519 | 1563 | YETVEMVFIATVT | | | X | P08173 |
| 1520 | 1564 | EYGSFFCELWTSVD | | | X | P08588 |
| 1521 | 1565 | LAITSPFRYQSLLT | | | X | P08588 |
| 1522 | 1566 | LVALREQKALK | | | X | P08588 |
| 1523 | 1567 | PGAASDDDDDD | | | X | P08588 |
| 1524 | 1568 | PPSPSPSPVPA | | | X | P08588 |
| 1525 | 1569 | RARARGLVCTV | | | X | P08588 |
| 1526 | 1570 | SFFCELWTSVD | | | X | P08588 |
| 1527 | 1571 | VWAISALVSFL | | | X | P08588 |
| 1528 | 1572 | WEYGSFFCELW | | | X | P08588 |
| 1529 | 1573 | ARLLEPW | | | X | P08588 |
| 1530 | 1574 | ARLLVPA | | | X | P08588 |
| 1531 | 1575 | DVVGATPPARLLE | | | X | P08588 |
| 1532 | 1576 | LPPASES | | | X | P08588 |
| 1533 | 1577 | PPARLLE | | | X | P08588 |
| 1534 | 1578 | QQWTAGMGLLMAL | | | X | P08588 |
| 1535 | 1579 | RLLCCARRAARRR | | | X | P08588 |
| 1536 | 1580 | SFFCELWTSVDVL | | | X | P08588 |
| 1537 | 1581 | RAARFRIRKTVKKV | | | X | P08908 |
| 1538 | 1582 | AQRERNQASWS | | | X | P08912 |
| 1539 | 1583 | CLRCPRPTLAQRER | | | X | P08912 |
| 1540 | 1584 | CWQYLVGKRTV | | | X | P08912 |
| 1541 | 1585 | DSYHNATTVNG | | | X | P08912 |
| 1542 | 1586 | EDEDKPATDPV | | | X | P08912 |
| 1543 | 1587 | GEEFSAEETEETFV | | | X | P08912 |
| 1544 | 1588 | GKRTVPLDECQ | | | X | P08912 |
| 1545 | 1589 | GTPVNHQPLER | | | X | P08912 |
| 1546 | 1590 | KPATDPVLQVV | | | X | P08912 |
| 1547 | 1591 | KRTKDLADLQGSDS | | | X | P08912 |
| 1548 | 1592 | LGYWLCYVNSTVNP | | | X | P08912 |
| 1549 | 1593 | NLLVISFDRYF | | | X | P08912 |
| 1550 | 1594 | PICYALCNRTF | | | X | P08912 |
| 1551 | 1595 | QGKESPGEEFSAEE | | | X | P08912 |
| 1552 | 1596 | QYLVGKRTVPLDEC | | | X | P08912 |
| 1553 | 1597 | RKTFKMLLLCRWKK | | | X | P08912 |
| 1554 | 1598 | TEETFVKAETE | | | X | P08912 |
| 1555 | 1599 | TLAQRERNQAS | | | X | P08912 |
| 1556 | 1600 | TVNGTPVNHQPLER | | | X | P08912 |
| 1557 | 1601 | WALGSLACDLW | | | X | P08912 |
| 1558 | 1602 | AETEKSD | | | X | P08912 |
| 1559 | 1603 | ALFRSCLRCPRPT | | | X | P08912 |
| 1560 | 1604 | ASWSSSRRSTSTT | | | X | P08912 |
| 1561 | 1605 | DPVLQVV | | | X | P08912 |
| 1562 | 1606 | EEFSAEETEETFV | | | X | P08912 |
| 1563 | 1607 | EFSAEETEETFVK | | | X | P08912 |
| 1564 | 1608 | FKMLLLCRWKKKK | | | X | P08912 |
| 1565 | 1609 | FRSCLRCPRPTLA | | | X | P08912 |
| 1566 | 1610 | FSAEETEETFVKA | | | X | P08912 |
| 1567 | 1611 | GKRTVPLDECQIQ | | | X | P08912 |
| 1568 | 1612 | GYWLCYVNSTVNP | | | X | P08912 |
| 1569 | 1613 | KMLLLCRWKKKKV | | | X | P08912 |
| 1570 | 1614 | KPAHRALFRSCLR | | | X | P08912 |
| 1571 | 1615 | LYTTYILMGRWAL | | | X | P08912 |
| 1572 | 1616 | SPGEEFSAEETEE | | | X | P08912 |
| 1573 | 1617 | SSYPSSEDEDKPA | | | X | P08912 |
| 1574 | 1618 | SYPSSEDEDKPAT | | | X | P08912 |
| 1575 | 1619 | TCSSYPSSEDEDK | | | X | P08912 |
| 1576 | 1620 | VNSTVNP | | | X | P08912 |
| 1577 | 1621 | YVNSTVN | | | X | P08912 |
| 1578 | 1622 | YWLCYVNSTVNPI | | | X | P08912 |
| 1579 | 1623 | AWCEIYLALDV | | | X | P08913 |
| 1580 | 1624 | DSLPRRGPGAT | | | X | P08913 |
| 1581 | 1625 | HAERPPGPRRPERG | | | X | P08913 |
| 1582 | 1626 | ISLDRYWSITQAIE | | | X | P08913 |
| 1583 | 1627 | KFFFWFGYCNSSLN | | | X | P08913 |
| 1584 | 1628 | LALDVLFCTSSIVH | | | X | P08913 |
| 1585 | 1629 | PMGSLQPDAGN | | | X | P08913 |
| 1586 | 1630 | PPGGTERRPNG | | | X | P08913 |
| 1587 | 1631 | SSDHAERPPGPRRP | | | X | P08913 |
| 1588 | 1632 | SSIVHLCAISLDRY | | | X | P08913 |
| 1589 | 1633 | TERRPNGLGPE | | | X | P08913 |
| 1590 | 1634 | VHLCAISLDRY | | | X | P08913 |
| 1591 | 1635 | YTIFNHDFRRA | | | X | P08913 |
| 1592 | 1636 | ALDLEES | | | X | P08913 |
| 1593 | 1637 | ATLVIPFSLANEV | | | X | P08913 |
| 1594 | 1638 | DFRRAFK | | | X | P08913 |
| 1595 | 1639 | FSLANEV | | | X | P08913 |
| 1596 | 1640 | GAEAEPL | | | X | P08913 |
| 1597 | 1641 | AYSWKEEEEED | | | X | P11229 |
| 1598 | 1642 | CKDCVPETLWELGY | | | X | P11229 |
| 1599 | 1643 | CVPETLWELGYWLC | | | X | P11229 |
| 1600 | 1644 | GSEVVIKMPMV | | | X | P11229 |
| 1601 | 1645 | GYWLCYVNSTINPM | | | X | P11229 |
| 1602 | 1646 | KQPPRSSPNTVKRP | | | X | P11229 |
| 1603 | 1647 | LLQAYSWKEEEEED | | | X | P11229 |
| 1604 | 1648 | LQAYSWKEEEE | | | X | P11229 |
| 1605 | 1649 | NLLVLISFKVNTEL | | | X | P11229 |
| 1606 | 1650 | SEGEEPGSEVV | | | X | P11229 |
| 1607 | 1651 | SWKEEEEEDEG | | | X | P11229 |
| 1608 | 1652 | EEEEEDE | | | X | P11229 |
| 1609 | 1653 | EEEEEDEGSMESL | | | X | P11229 |
| 1610 | 1654 | KEEEEED | | | X | P11229 |
| 1611 | 1655 | LLQAYSW | | | X | P11229 |
| 1612 | 1656 | QAYSWKEEEEEDE | | | X | P11229 |
| 1613 | 1657 | RPLSYRAKRTPRR | | | X | P11229 |
| 1614 | 1658 | SLTSSEG | | | X | P11229 |
| 1615 | 1659 | WKEEEEE | | | X | P11229 |
| 1616 | 1660 | GLGPDGQGHQE | | | X | P11230 |
| 1617 | 1661 | LKRPKPERDLMPEP | | | X | P11230 |
| 1618 | 1662 | YLDLEWTDYRLSWD | | | X | P11230 |
| 1619 | 1663 | AVALLPELREVVS | | | X | P11230 |
| 1620 | 1664 | CTMVFSS | | | X | P11230 |
| 1621 | 1665 | HEGTFIE | | | X | P11230 |
| 1622 | 1666 | LAPGVRG | | | X | P11230 |
| 1623 | 1667 | SYSYDSSEVSLQT | | | X | P11230 |
| 1624 | 1668 | TPGALLM | | | X | P11230 |
| 1625 | 1669 | WTFIIFT | | | X | P11230 |
| 1626 | 1670 | ATGCELWTSVD | | | X | P13945 |
| 1627 | 1671 | GLIMGTFTLCW | | | X | P13945 |
| 1628 | 1672 | LPTLAPNTANT | | | X | P13945 |
| 1629 | 1673 | RALGGPSLVPG | | | X | P13945 |
| 1630 | 1674 | SRSLAPAPVGT | | | X | P13945 |
| 1631 | 1675 | VDRYLAVTNPL | | | X | P13945 |
| 1632 | 1676 | VGADAEAQRCHSNP | | | X | P13945 |
| 1633 | 1677 | RYGALVT | | | X | P13945 |
| 1634 | 1678 | IKIYIVLRRRRKRV | | | X | P14416 |
| 1635 | 1679 | LVYIKIYIVLRRRR | | | X | P14416 |
| 1636 | 1680 | HGLHSTPDSPAKPE | | | X | P14416 |
| 1637 | 1681 | IVLRRRRKRVNTKR | | | X | P14416 |
| 1638 | 1682 | KIYIVLRRRRKRVN | | | X | P14416 |
| 1639 | 1683 | MPNGKTRTSLKTMS | | | X | P14416 |
| 1640 | 1684 | RRRRKRVNTKRSSR | | | X | P14416 |
| 1641 | 1685 | VYIKIYIVLRRRRK | | | X | P14416 |
| 1642 | 1686 | AVCYAFVFSALIEF | | | X | P14867 |
| 1643 | 1687 | ECPMHLEDFPMDAH | | | X | P14867 |
| 1644 | 1688 | KVAYATAMDWFIAV | | | X | P14867 |
| 1645 | 1689 | YFVIQTYLPCIMTV | | | X | P14867 |
| 1646 | 1690 | FTKRGYAWDGKSVV | | | X | P14867 |
| 1647 | 1691 | FNVYIESDAWQEKD | | | X | P15382 |
| 1648 | 1692 | AILYYYQSGGRLRR | | | X | P16389 |
| 1649 | 1693 | DENEDMHGSGVTFH | | | X | P16389 |
| 1650 | 1694 | DYMEIQEGVNNSNE | | | X | P16389 |
| 1651 | 1695 | EDMHGSGVTFHTYS | | | X | P16389 |
| 1652 | 1696 | EGVNNSNEDFREEN | | | X | P16389 |
| 1653 | 1697 | EIQEGVNNSNEDFR | | | X | P16389 |
| 1654 | 1698 | EMFREDEGYIKEEE | | | X | P16389 |
| 1655 | 1699 | FRIFKLSRHSKGLQ | | | X | P16389 |
| 1656 | 1700 | FYELGEEAMEMFRE | | | X | P16389 |
| 1657 | 1701 | ISIVSFCLETLPIF | | | X | P16389 |
| 1658 | 1702 | KLSRHSKGLQILGQ | | | X | P16389 |
| 1659 | 1703 | PQDTYDPEADHECC | | | X | P16389 |
| 1660 | 1704 | MEIQEGVNNSNEDF | | | X | P16389 |
| 1661 | 1705 | SDYMEIQEGVNNSN | | | X | P16389 |
| 1662 | 1706 | VNNSNEDFREENLK | | | X | P16389 |
| 1663 | 1707 | FLHLTRADLSYPSH | | | X | P16473 |
| 1664 | 1708 | YVFFEEQEDEIIGF | | | X | P16473 |
| 1665 | 1709 | EYPESSGPARGIAI | | | X | P17658 |
| 1666 | 1710 | GGSFFTDPFFLVET | | | X | P17658 |
| 1667 | 1711 | GVSRVSPVSRGSQE | | | X | P17658 |
| 1668 | 1712 | LAAPGEVRGPEGEQ | | | X | P17658 |
| 1669 | 1713 | LRATDNGLGKPDFP | | | X | P17658 |
| 1670 | 1714 | PVSRGSQEEEEDED | | | X | P17658 |
| 1671 | 1715 | QEEEEDEDDSYTFH | | | X | P17658 |
| 1672 | 1716 | REDEGCLPEGGEDE | | | X | P17658 |
| 1673 | 1717 | RGSQEEEEDEDDSY | | | X | P17658 |
| 1674 | 1718 | SQPFQRQVWLLFEY | | | X | P17658 |
| 1675 | 1719 | STLGGSFFTDPFFL | | | X | P17658 |
| 1676 | 1720 | ERLVINISGLRFET | | | X | P17658 |
| 1677 | 1721 | RSEKSLTLAAPGEV | | | X | P17658 |
| 1678 | 1722 | SQEEEEDEDDSYTF | | | X | P17658 |
| 1679 | 1723 | YFAEADDDDSLFPS | | | X | P17658 |
| 1680 | 1724 | ACKIEVKHFPF | | | X | P17787 |
| 1681 | 1725 | AGAFGAEPAPV | | | X | P17787 |
| 1682 | 1726 | CARQRLRLRRR | | | X | P17787 |
| 1683 | 1727 | CGEKMTLCISV | | | X | P17787 |
| 1684 | 1728 | EKMTLCISVLL | | | X | P17787 |
| 1685 | 1729 | GPVALLLGFGL | | | X | P17787 |
| 1686 | 1730 | ISVHEREQIMTTNV | | | X | P17787 |
| 1687 | 1731 | KVRLPSKHIWLPDV | | | X | P17787 |
| 1688 | 1732 | MTTNVWLTQEWEDY | | | X | P17787 |
| 1689 | 1733 | PPAIYKSACKI | | | X | P17787 |
| 1690 | 1734 | QRLRLRRRQREREG | | | X | P17787 |
| 1691 | 1735 | RLRRRQREREG | | | X | P17787 |
| 1692 | 1736 | RQRLRLRRRQR | | | X | P17787 |
| 1693 | 1737 | RSWTYDRTEID | | | X | P17787 |
| 1694 | 1738 | VASLDDFTPSGEWD | | | X | P17787 |
| 1695 | 1739 | VHEREQIMTTN | | | X | P17787 |
| 1696 | 1740 | VSLAQLISVHEREQ | | | X | P17787 |
| 1697 | 1741 | WTYDRTEIDLVLKS | | | X | P17787 |
| 1698 | 1742 | YDRTEIDLVLK | | | X | P17787 |
| 1699 | 1743 | CARQRLRLRRRQR | | | X | P17787 |
| 1700 | 1744 | GAEPAPV | | | X | P17787 |
| 1701 | 1745 | GLAGAFGAEPAPV | | | X | P17787 |
| 1702 | 1746 | HHCARQRLRLRRR | | | X | P17787 |
| 1703 | 1747 | ISVHEREQIMTTN | | | X | P17787 |
| 1704 | 1748 | NAVVSYD | | | X | P17787 |
| 1705 | 1749 | RHHCARQRLRLRR | | | X | P17787 |
| 1706 | 1750 | AAITFLILFTI | | | X | P18089 |
| 1707 | 1751 | ASPEDEAEEEE | | | X | P18089 |
| 1708 | 1752 | CGASPEDEAEEEEE | | | X | P18089 |
| 1709 | 1753 | EEEEEECEPQAVPV | | | X | P18089 |
| 1710 | 1754 | EEEEEEECEPQ | | | X | P18089 |
| 1711 | 1755 | EEEEEEEECEP | | | X | P18089 |
| 1712 | 1756 | EEEEEEEEECEPQA | | | X | P18089 |
| 1713 | 1757 | GASPEDEAEEE | | | X | P18089 |
| 1714 | 1758 | PEDEAEEEEEE | | | X | P18089 |
| 1715 | 1759 | SGQGQKEGVCGASP | | | X | P18089 |
| 1716 | 1760 | SPEDEAEEEEE | | | X | P18089 |
| 1717 | 1761 | STGEKEEGETP | | | X | P18089 |
| 1718 | 1762 | AEEEEEE | | | X | P18089 |
| 1719 | 1763 | AEEEEEEEEEEEE | | | X | P18089 |
| 1720 | 1764 | DEAEEEEEEEEEE | | | X | P18089 |
| 1721 | 1765 | EAEEEEE | | | X | P18089 |
| 1722 | 1766 | EAEEEEEEEEEEE | | | X | P18089 |
| 1723 | 1767 | EDEAEEEEEEEEE | | | X | P18089 |
| 1724 | 1768 | EEEEECE | | | X | P18089 |
| 1725 | 1769 | EEEEEEC | | | X | P18089 |
| 1726 | 1770 | EEEEEEEECEPQA | | | X | P18089 |
| 1727 | 1771 | EEEEEEEEECEPQ | | | X | P18089 |
| 1728 | 1772 | EEEEEEEEEECEP | | | X | P18089 |
| 1729 | 1773 | EEEEEEEEEEECE | | | X | P18089 |
| 1730 | 1774 | EEEEEEEEEEEEC | | | X | P18089 |
| 1731 | 1775 | GEKEEGE | | | X | P18089 |
| 1732 | 1776 | GQKEGVC | | | X | P18089 |
| 1733 | 1777 | IILTVWLIAAVIS | | | X | P18089 |
| 1734 | 1778 | IYTIFNQ | | | X | P18089 |
| 1735 | 1779 | NSGQGQKEGVCGA | | | X | P18089 |
| 1736 | 1780 | PEDEAEEEEEEEE | | | X | P18089 |
| 1737 | 1781 | RALPPSWAALPNS | | | X | P18089 |
| 1738 | 1782 | RAQLTRE | | | X | P18089 |
| 1739 | 1783 | RGRPQCK | | | X | P18089 |
| 1740 | 1784 | SPEDEAEEEEEEE | | | X | P18089 |
| 1741 | 1785 | TGEKEEG | | | X | P18089 |
| 1742 | 1786 | TIFNQDF | | | X | P18089 |
| 1743 | 1787 | VNGHSKSTGEKEE | | | X | P18089 |
| 1744 | 1788 | WAALPNSGQGQKE | | | X | P18089 |
| 1745 | 1789 | ETLPKIPYVKAIDI | | | X | P18505 |
| 1746 | 1790 | IDVASIDMVSEVNM | | | X | P18505 |
| 1747 | 1791 | LRPDFGGPPVDVGM | | | X | P18505 |
| 1748 | 1792 | PLDEQNCTLEIESY | | | X | P18505 |
| 1749 | 1793 | VCCAHSTNEPSNMS | | | X | P18505 |
| 1750 | 1794 | AARVALGITTVLTM | | | X | P18505 |
| 1751 | 1795 | GCFVFVFLALLEYA | | | X | P18505 |
| 1752 | 1796 | YDIRLRPDFGGPPV | | | X | P18505 |
| 1753 | 1797 | ATHLQERDEEYGYE | | | X | P18507 |
| 1754 | 1798 | DAECQLQLHNFPMD | | | X | P18507 |
| 1755 | 1799 | DAVPARTSLGITTV | | | X | P18507 |
| 1756 | 1800 | KKNPAPTIDIRPRS | | | X | P18507 |
| 1757 | 1801 | KVSYVTAMDLFVSV | | | X | P18507 |
| 1758 | 1802 | LDGKDCASFFCCFE | | | X | P18507 |
| 1759 | 1803 | LIHTDMYVNSIGPV | | | X | P18507 |
| 1760 | 1804 | NFPMDEHSCPLEFS | | | X | P18507 |
| 1761 | 1805 | NTTEVVKTTSGDYV | | | X | P18507 |
| 1762 | 1806 | SNRKPSKDKDKKKK | | | X | P18507 |
| 1763 | 1807 | KPSKDKDKKKKNPA | | | X | P18507 |
| 1764 | 1808 | VLYTLRLTIDAECQ | | | X | P18507 |
| 1765 | 1809 | AAAGPNASGAGERG | | | X | P18825 |
| 1766 | 1810 | ADVEPDESSAAAER | | | X | P18825 |
| 1767 | 1811 | ANASGASWGPPRGQ | | | X | P18825 |
| 1768 | 1812 | APPPADVEPDE | | | X | P18825 |
| 1769 | 1813 | GAAYPQCGLND | | | X | P18825 |
| 1770 | 1814 | HCAPPPADVEPDES | | | X | P18825 |
| 1771 | 1815 | IAVLTSRALRA | | | X | P18825 |
| 1772 | 1816 | ILFRRRRRGFR | | | X | P18825 |
| 1773 | 1817 | IVFTVVGNVLV | | | X | P18825 |
| 1774 | 1818 | LIMGLVYARIY | | | X | P18825 |
| 1775 | 1819 | PADVEPDESSA | | | X | P18825 |
| 1776 | 1820 | PCLIMGLVYAR | | | X | P18825 |
| 1777 | 1821 | PDGAAYPQCGLNDE | | | X | P18825 |
| 1778 | 1822 | PFSLANELMAY | | | X | P18825 |
| 1779 | 1823 | PPPADVEPDES | | | X | P18825 |
| 1780 | 1824 | PPPADVEPDESSAA | | | X | P18825 |
| 1781 | 1825 | RRGALRRGGRR | | | X | P18825 |
| 1782 | 1826 | AAAERRRRRGALR | | | X | P18825 |
| 1783 | 1827 | AAERRRRRGALRR | | | X | P18825 |
| 1784 | 1828 | AAGPNAS | | | X | P18825 |
| 1785 | 1829 | AAVVGFL | | | X | P18825 |
| 1786 | 1830 | AERRRRR | | | X | P18825 |
| 1787 | 1831 | AERRRRRGALRRG | | | X | P18825 |
| 1788 | 1832 | AGERGSG | | | X | P18825 |
| 1789 | 1833 | FRRSFKHILFRRR | | | X | P18825 |
| 1790 | 1834 | GFLIVFT | | | X | P18825 |
| 1791 | 1835 | KHILFRRRRRGFR | | | X | P18825 |
| 1792 | 1836 | LFRRRRR | | | X | P18825 |
| 1793 | 1837 | NASGAGE | | | X | P18825 |
| 1794 | 1838 | PFFFSYSLYGICR | | | X | P18825 |
| 1795 | 1839 | RRRGALRRGGRRR | | | X | P18825 |
| 1796 | 1840 | RRRRARSSVCRRK | | | X | P18825 |
| 1797 | 1841 | RRRRGALRRGGRR | | | X | P18825 |
| 1798 | 1842 | RRRRRGALRRGGR | | | X | P18825 |
| 1799 | 1843 | SFKHILFRRRRRG | | | X | P18825 |
| 1800 | 1844 | SRALRAP | | | X | P18825 |
| 1801 | 1845 | SRRRRARSSVCRR | | | X | P18825 |
| 1802 | 1846 | YRVAKLRTRTLSE | | | X | P18825 |
| 1803 | 1847 | AASLENSASSDEED | | | X | P20309 |
| 1804 | 1848 | CYINSTVNPVC | | | X | P20309 |
| 1805 | 1849 | DNLQVPEEELG | | | X | P20309 |
| 1806 | 1850 | FSKLPIQLESAVDT | | | X | P20309 |
| 1807 | 1851 | LACDLWLAIDY | | | X | P20309 |
| 1808 | 1852 | LERKADKLQAQ | | | X | P20309 |
| 1809 | 1853 | LGNLACDLWLAIDY | | | X | P20309 |
| 1810 | 1854 | LPIQLESAVDT | | | X | P20309 |
| 1811 | 1855 | LQVPEEELGMV | | | X | P20309 |
| 1812 | 1856 | PLFPNISSSWI | | | X | P20309 |
| 1813 | 1857 | TAIAAFYMPVT | | | X | P20309 |
| 1814 | 1858 | TFGTAIAAFYMPVT | | | X | P20309 |
| 1815 | 1859 | TTKRAGVMIGLAWV | | | X | P20309 |
| 1816 | 1860 | VDTAKTSDVNS | | | X | P20309 |
| 1817 | 1861 | WLCYINSTVNP | | | X | P20309 |
| 1818 | 1862 | ELAGLQA | | | X | P20309 |
| 1819 | 1863 | IFHKRAP | | | X | P20309 |
| 1820 | 1864 | INSTVNP | | | X | P20309 |
| 1821 | 1865 | NSTVNPV | | | X | P20309 |
| 1822 | 1866 | QQQSMKRSNRRKY | | | X | P20309 |
| 1823 | 1867 | QSMKRSN | | | X | P20309 |
| 1824 | 1868 | RPLTYRAKRTTKR | | | X | P20309 |
| 1825 | 1869 | TKRKRMSLVKEKK | | | X | P20309 |
| 1826 | 1870 | YINSTVN | | | X | P20309 |
| 1827 | 1871 | FKTGNSTATCTTNN | | | X | P22001 |
| 1828 | 1872 | GRELPPDMTVVPGD | | | X | P22001 |
| 1829 | 1873 | AAAAAAVAAATAAV | | | X | P22459 |
| 1830 | 1874 | ATAAVEGSGGSGGG | | | X | P22459 |
| 1831 | 1875 | CTSHDPQSSRGSRR | | | X | P22459 |
| 1832 | 1876 | EEEEEEEGRFYYSE | | | X | P22459 |
| 1833 | 1877 | EEEEGRFYYSEDDH | | | X | P22459 |
| 1834 | 1878 | FREDEGFVREEEDR | | | X | P22459 |
| 1835 | 1879 | FYYSEDDHGDECSY | | | X | P22459 |
| 1836 | 1880 | GVKESLCAKEEKCQ | | | X | P22459 |
| 1837 | 1881 | KILRELSEEEEDEE | | | X | P22459 |
| 1838 | 1882 | LLKFREDEGFVREE | | | X | P22459 |
| 1839 | 1883 | QLGEEALLKFREDE | | | X | P22459 |
| 1840 | 1884 | SEEKILRELSEEEE | | | X | P22459 |
| 1841 | 1885 | SFPHCSDLMPSGSE | | | X | P22459 |
| 1842 | 1886 | SGHTIFNDPFFIVE | | | X | P22459 |
| 1843 | 1887 | SSTSSSLGDKSEYL | | | X | P22459 |
| 1844 | 1888 | TIFNDPFFIVETVC | | | X | P22459 |
| 1845 | 1889 | TQYFDPLRNEYFFD | | | X | P22459 |
| 1846 | 1890 | VSGLRFETQMKTLA | | | X | P22459 |
| 1847 | 1891 | EEDEEEEEEEEEEG | | | X | P22459 |
| 1848 | 1892 | RELSEEEEDEEEEE | | | X | P22459 |
| 1849 | 1893 | SEEEEDEEEEEEEE | | | X | P22459 |
| 1850 | 1894 | RGSRRRRRQRSEKK | | | X | P22459 |
| 1851 | 1895 | RRRRRQRSEKKKAH | | | X | P22459 |
| 1852 | 1896 | ELPRPRRPPPEDEE | | | X | P22460 |
| 1853 | 1897 | ENGGAMTVRGGDEA | | | X | P22460 |
| 1854 | 1898 | FDRNRPSFDGILYY | | | X | P22460 |
| 1855 | 1899 | LLPRTLADPFFIVE | | | X | P22460 |
| 1856 | 1900 | LPPLPEELPRPRRP | | | X | P22460 |
| 1857 | 1901 | LSDGPKEPAPKGRG | | | X | P22460 |
| 1858 | 1902 | PLEKCNVKAKSNVD | | | X | P22460 |
| 1859 | 1903 | RETDHEEPAVLKEE | | | X | P22460 |
| 1860 | 1904 | SLDVFADEIRFYQL | | | X | P22460 |
| 1861 | 1905 | TFELLVRFFACPSK | | | X | P22460 |
| 1862 | 1906 | TVGYGDMRPITVGG | | | X | P22460 |
| 1863 | 1907 | EEEEGDPGLGTVED | | | X | P22460 |
| 1864 | 1908 | PEDEEEEGDPGLGT | | | X | P22460 |
| 1865 | 1909 | VNVSLDVFADEIRF | | | X | P22460 |
| 1866 | 1910 | AKDGISVKGANNSN | | | X | P23415 |
| 1867 | 1911 | ANNSNTTNPPPAPS | | | X | P23415 |
| 1868 | 1912 | CLLFVFSALLEYAA | | | X | P23415 |
| 1869 | 1913 | GISVKGANNSNTTN | | | X | P23415 |
| 1870 | 1914 | VKGANNSNTTNPPP | | | X | P23415 |
| 1871 | 1915 | DFSMRPGFGGPAIP | | | X | P24046 |
| 1872 | 1916 | DSLKTDERISLSQF | | | X | P24046 |
| 1873 | 1917 | GFGGPAIPVGVDVQ | | | X | P24046 |
| 1874 | 1918 | GKVLYSLRVTVTAM | | | X | P24046 |
| 1875 | 1919 | MRPGFGGPAIPVGV | | | X | P24046 |
| 1876 | 1920 | QPDGKVLYSLRVTV | | | X | P24046 |
| 1877 | 1921 | TLYLRHYWKDERLS | | | X | P24046 |
| 1878 | 1922 | VQVESLDSISEVDM | | | X | P24046 |
| 1879 | 1923 | WVPDMFFVHSKRSF | | | X | P24046 |
| 1880 | 1924 | CSLEIESYAYTEDD | | | X | P24046 |
| 1881 | 1925 | ERLSFPSTNNLSMT | | | X | P24046 |
| 1882 | 1926 | SLEEKQSCLKFKAN | | | X | P24530 |
| 1883 | 1927 | AADAFDIGSFDEED | | | X | P25098 |
| 1884 | 1928 | AFDIGSFDEED | | | X | P25098 |
| 1885 | 1929 | DLFQPYIEEIC | | | X | P25098 |
| 1886 | 1930 | DRLEARKKAKN | | | X | P25098 |
| 1887 | 1931 | EEARPLVEFYEEIK | | | X | P25098 |
| 1888 | 1932 | EEERVARSREIFDS | | | X | P25098 |
| 1889 | 1933 | FQKFIESDKFT | | | X | P25098 |
| 1890 | 1934 | GEGEAPQSLLT | | | X | P25098 |
| 1891 | 1935 | HKTKDKHEIDR | | | X | P25098 |
| 1892 | 1936 | LLTMEEIQSVE | | | X | P25098 |
| 1893 | 1937 | LPDSFSPELRSLLE | | | X | P25098 |
| 1894 | 1938 | NHLEEARPLVE | | | X | P25098 |
| 1895 | 1939 | QNLRGDVFQKFIES | | | X | P25098 |
| 1896 | 1940 | QQEVAETVFDTINA | | | X | P25098 |
| 1897 | 1941 | RPLVEFYEEIK | | | X | P25098 |
| 1898 | 1942 | SFSPELRSLLE | | | X | P25098 |
| 1899 | 1943 | SVEETQIKERK | | | X | P25098 |
| 1900 | 1944 | TMEEIQSVEET | | | X | P25098 |
| 1901 | 1945 | WRGEGEAPQSLLTM | | | X | P25098 |
| 1902 | 1946 | YLEDRGEVTFE | | | X | ?25098 |
| 1903 | 1947 | AAEIILG | | | X | P25098 |
| 1904 | 1948 | APQSLLT | | | X | P25098 |
| 1905 | 1949 | EEERVARSREIFD | | | X | P25098 |
| 1906 | 1950 | EIQSVEE | | | X | P25098 |
| 1907 | 1951 | ERVARSREIFDSY | | | X | P25098 |
| 1908 | 1952 | GRGGFGE | | | X | P25098 |
| 1909 | 1953 | GYMAPEV | | | X | P25098 |
| 1910 | 1954 | HPFSKSA | | | X | P25098 |
| 1911 | 1955 | IGRGGFG | | | X | P25098 |
| 1912 | 1956 | IPPRGEV | | | X | P25098 |
| 1913 | 1957 | IQSVEETQIKERK | | | X | P25098 |
| 1914 | 1958 | ISERWQQEVAETV | | | X | P25098 |
| 1915 | 1959 | KYPPPLIPPRGEV | | | X | P25098 |
| 1916 | 1960 | LEDRGEV | | | X | P25098 |
| 1917 | 1961 | LTMNDFS | | | X | P25098 |
| 1918 | 1962 | PQSLLTM | | | X | P25098 |
| 1919 | 1963 | QSVEETQIKERKC | | | X | P25098 |
| 1920 | 1964 | RGGFGEV | | | X | P25098 |
| 1921 | 1965 | RVARSREIFDSYI | | | X | P25098 |
| 1922 | 1966 | SVMQKYLEDRGEV | | | X | P25098 |
| 1923 | 1967 | ALTALPDPDPE | | | X | P25100 |
| 1924 | 1968 | APSSGDAPPGAPLA | | | X | P25100 |
| 1925 | 1969 | CQCRRRRRRRP | | | X | P25100 |
| 1926 | 1970 | CRRRRRRRPLW | | | X | P25100 |
| 1927 | 1971 | DPEPPGTPEMQAPV | | | X | P25100 |
| 1928 | 1972 | ERGKASEVVLR | | | X | P25100 |
| 1929 | 1973 | FRDLLSVSFEG | | | X | P25100 |
| 1930 | 1974 | LRCQCRRRRRR | | | X | P25100 |
| 1931 | 1975 | LRCQCRRRRRRRPL | | | X | P25100 |
| 1932 | 1976 | MQAPVASRRKPPSA | | | X | P25100 |
| 1933 | 1977 | PLLGWKEPVPPDER | | | X | P25100 |
| 1934 | 1978 | QCRRRRRRRPL | | | X | P25100 |
| 1935 | 1979 | QDCAPSSGDAPPGA | | | X | P25100 |
| 1936 | 1980 | RCQCRRRRRRR | | | X | P25100 |
| 1937 | 1981 | WRASTSGLRQDCAP | | | X | P25100 |
| 1938 | 1982 | CQCRRRRRRRPLW | | | X | P25100 |
| 1939 | 1983 | CRRRRRR | | | X | P25100 |
| 1940 | 1984 | EVAEGATCQAYEL | | | X | P25100 |
| 1941 | 1985 | FLRLLRCQCRRRR | | | X | P25100 |
| 1942 | 1986 | FSREKKAAKTLAI | | | X | P25100 |
| 1943 | 1987 | GATCQAYELADYS | | | X | P25100 |
| 1944 | 1988 | LCCTASILSLCTI | | | X | P25100 |
| 1945 | 1989 | PEMQAPV | | | X | P25100 |
| 1946 | 1990 | RRRRRRPLWRVYG | | | X | P25100 |
| 1947 | 1991 | RRRRRRR | | | X | P25100 |
| 1948 | 1992 | RRRRRRRPLWRVY | | | X | P25100 |
| 1949 | 1993 | SATMEVL | | | X | P25100 |
| 1950 | 1994 | VIFWLGY | | | X | P25100 |
| 1951 | 1995 | VLCWFPFFFVLPL | | | X | P25100 |
| 1952 | 1996 | VVCCAQSVNDPGNM | | | X | P28472 |
| 1953 | 1997 | LYWKNGDESLKTDE | | | X | P28476 |
| 1954 | 1998 | QTCSLELESYAYTD | | | X | P28476 |
| 1955 | 1999 | CTIDVTFFPFD | | | X | P30532 |
| 1956 | 2000 | DQDVDKRDFFD | | | X | P30532 |
| 1957 | 2001 | GLSFLTVLVFY | | | X | P30532 |
| 1958 | 2002 | HEDSLLKDLFQDYE | | | X | P30532 |
| 1959 | 2003 | PSDSVWTPDIVLFD | | | X | P30532 |
| 1960 | 2004 | QDVDKRDFFDNGEW | | | X | P30532 |
| 1961 | 2005 | QKEETESGSGP | | | X | P30532 |
| 1962 | 2006 | RDFFDNGEWEI | | | X | P30532 |
| 1963 | 2007 | SVWTPDIVLFDNAD | | | X | P30532 |
| 1964 | 2008 | SWTYDGSQVDIILE | | | X | P30532 |
| 1965 | 2009 | TKTVIRYNGTVTWT | | | X | P30532 |
| 1966 | 2010 | AISQLVDVDEKNQ | | | X | P30532 |
| 1967 | 2011 | RYNGTVT | | | X | P30532 |
| 1968 | 2012 | TYSFVIKRLPLFY | | | X | P30532 |
| 1969 | 2013 | VTYSFVIKRLPLF | | | X | P30532 |
| 1970 | 2014 | DFIIKRKPLFY | | | X | P30926 |
| 1971 | 2015 | MRRAPSLVLFFLVA | | | X | P30926 |
| 1972 | 2016 | NEREQIMTTNV | | | X | P30926 |
| 1973 | 2017 | SLAQLISVNER | | | X | P30926 |
| 1974 | 2018 | TSPSNFYGNSM | | | X | P30926 |
| 1975 | 2019 | VFMFVCVLGTV | | | X | P30926 |
| 1976 | 2020 | DFIIKRKPLFYTI | | | X | P30926 |
| 1977 | 2021 | ISVNEREQIMTTN | | | X | P30926 |
| 1978 | 2022 | LISVNEREQIMTT | | | X | P30926 |
| 1979 | 2023 | ECPMQLEDFPMDAH | | | X | P31644 |
| 1980 | 2024 | GMFSGFIMIKNLLL | | | X | P31644 |
| 1981 | 2025 | ISAECPMQLEDFPM | | | X | P31644 |
| 1982 | 2026 | KKREVILNKSTNAF | | | X | P31644 |
| 1983 | 2027 | MNLSSHFGFSQMPT | | | X | P31644 |
| 1984 | 2028 | SGFIMIKNLLLFCI | | | X | P31644 |
| 1985 | 2029 | DGKKALEAAKIKKK | | | X | P31644 |
| 1986 | 2030 | EVILNKSTNAFTTG | | | X | P31644 |
| 1987 | 2031 | ASEAEHRLFERLFE | | | X | P32297 |
| 1988 | 2032 | DIKYNCCEEIY | | | X | P32297 |
| 1989 | 2033 | ERLFEDYNEIIRPV | | | X | P32297 |
| 1990 | 2034 | HHRRIKISNFSANL | | | X | P32297 |
| 1991 | 2035 | HRLFERLFEDY | | | X | P32297 |
| 1992 | 2036 | IRPVANVSDPV | | | X | P32297 |
| 1993 | 2037 | KIDVTYFPFDY | | | X | P32297 |
| 1994 | 2038 | MSQLVKVDEVN | | | X | P32297 |
| 1995 | 2039 | PVANVSDPVIIHFE | | | X | P32297 |
| 1996 | 2040 | RLFERLFEDYNEII | | | X | P32297 |
| 1997 | 2041 | VARASEAEHRLFER | | | X | P32297 |
| 1998 | 2042 | VDEVNQIMETN | | | X | P32297 |
| 1999 | 2043 | VDEVNQIMETNLWL | | | X | P32297 |
| 2000 | 2044 | CCEEIYPDITYSL | | | X | P32297 |
| 2001 | 2045 | CEEIYPDITYSLY | | | X | P32297 |
| 2002 | 2046 | DKTKALLKYTGEV | | | X | P32297 |
| 2003 | 2047 | ENMKAQN | | | X | P32297 |
| 2004 | 2048 | EVSMSQLVKVDEV | | | X | P32297 |
| 2005 | 2049 | IAENMKAQNEAKE | | | X | P32297 |
| 2006 | 2050 | LFERLFEDYNEII | | | X | P32297 |
| 2007 | 2051 | LKYTGEV | | | X | P32297 |
| 2008 | 2052 | RLFEDYNEIIRPV | | | X | P32297 |
| 2009 | 2053 | YSLYIRRLPLFYT | | | X | P32297 |
| 2010 | 2054 | AECPMHLEDFPMDV | | | X | P34903 |
| 2011 | 2055 | DSPTETKTYNSVSK | | | X | P34903 |
| 2012 | 2056 | IFTRILDRLLDGYD | | | X | P34903 |
| 2013 | 2057 | LYTMRLTIHAECPM | | | X | P34903 |
| 2014 | 2058 | PMHLEDFPMDVHAC | | | X | P34903 |
| 2015 | 2059 | TETKTYNSVSKVDK | | | X | P34903 |
| 2016 | 2060 | VVGTEIIRSSTGEY | | | X | P34903 |
| 2017 | 2061 | GQGESRRQEPGDFV | | | X | P34903 |
| 2018 | 2062 | SPTETKTYNSVSKV | | | X | P34903 |
| 2019 | 2063 | GLCIISIDRYI | | | X | P35348 |
| 2020 | 2064 | IDRYIGVSYPL | | | X | P35348 |
| 2021 | 2065 | IGPLFGWRQPAPED | | | X | P35348 |
| 2022 | 2066 | LKTDKSDSEQVTLR | | | X | P35348 |
| 2023 | 2067 | LTSTVLPFSAIFEV | | | X | P35348 |
| 2024 | 2068 | VLCWLPFFLVMPIG | | | X | P35348 |
| 2025 | 2069 | ITVSKDQSSCTTA | | | X | P35348 |
| 2026 | 2070 | PSETVFK | | | X | P35348 |
| 2027 | 2071 | ANGQPGFKSNMPLA | | | X | P35368 |
| 2028 | 2072 | ASILSLCAISIDRY | | | X | P35368 |
| 2029 | 2073 | CQCRGRGRRRR | | | X | P35368 |
| 2030 | 2074 | CRGRGRRRRRR | | | X | P35368 |
| 2031 | 2075 | DKECGVTEEPF | | | X | P35368 |
| 2032 | 2076 | GCQCRGRGRRRRRR | | | X | P35368 |
| 2033 | 2077 | GRGRRRRRRRR | | | X | P35368 |
| 2034 | 2078 | GRGRRRRRRRRRLG | | | X | P35368 |
| 2035 | 2079 | GRRRRRRRRRL | | | X | P35368 |
| 2036 | 2080 | LCWLPFFIALPLGS | | | X | P35368 |
| 2037 | 2081 | LSLCAISIDRY | | | X | P35368 |
| 2038 | 2082 | PCSSKEFKRAFVRI | | | X | P35368 |
| 2039 | 2083 | QCRGRGRRRRR | | | X | P35368 |
| 2040 | 2084 | RGRRRRRRRRR | | | X | P35368 |
| 2041 | 2085 | RILGCQCRGRGRRR | | | X | P35368 |
| 2042 | 2086 | RRRRRRRRRLG | | | X | P35368 |
| 2043 | 2087 | SIDRYIGVRYS | | | X | P35368 |
| 2044 | 2088 | ANFTGPNQTSSNS | | | X | P35368 |
| 2045 | 2089 | FTGPNQTSSNSTL | | | X | P35368 |
| 2046 | 2090 | GRRRRRR | | | X | P35368 |
| 2047 | 2091 | LGCQCRGRGRRRR | | | X | P35368 |
| 2048 | 2092 | NFTGPNQTSSNST | | | X | P35368 |
| 2049 | 2093 | QTSSNST | | | X | P35368 |
| 2050 | 2094 | RRRRRRLGGCAYT | | | X | P35368 |
| 2051 | 2095 | SFTVLPFSAALEV | | | X | P35368 |
| 2052 | 2096 | TGPNQTSSNSTLP | | | X | P35368 |
| 2053 | 2097 | CVPTPDSGVVCGRM | | | X | P36544 |
| 2054 | 2098 | DHYLQWNVSEY | | | X | P36544 |
| 2055 | 2099 | DISGYIPNGEW | | | X | P36544 |
| 2056 | 2100 | EGDPDLAKILE | | | X | P36544 |
| 2057 | 2101 | ELVKNYNPLER | | | X | P36544 |
| 2058 | 2102 | EVRYIANRFRCQDE | | | X | P36544 |
| 2059 | 2103 | FSLSLLQIMDVDEK | | | X | P36544 |
| 2060 | 2104 | GEDKVRPACQHKQR | | | X | P36544 |
| 2061 | 2105 | GIFKSSCYIDV | | | X | P36544 |
| 2062 | 2106 | HGGQPPEGDPD | | | X | P36544 |
| 2063 | 2107 | LERPVANDSQP | | | X | P36544 |
| 2064 | 2108 | LHGGQPPEGDPDLA | | | X | P36544 |
| 2065 | 2109 | LQMQEADISGY | | | X | P36544 |
| 2066 | 2110 | MLLVAEIMPAT | | | X | P36544 |
| 2067 | 2111 | MSAPNFVEAVS | | | X | P36544 |
| 2068 | 2112 | PACQHKQRRCSLAS | | | X | P36544 |
| 2069 | 2113 | SGYIPNGEWDL | | | X | P36544 |
| 2070 | 2114 | SLSLLQIMDVD | | | X | P36544 |
| 2071 | 2115 | SVPLIAQYFASTMI | | | X | P36544 |
| 2072 | 2116 | TVYFSLSLLQIMDV | | | X | P36544 |
| 2073 | 2117 | VKNYNPLERPV | | | X | P36544 |
| 2074 | 2118 | VTVIVLQYHHHDPD | | | X | P36544 |
| 2075 | 2119 | YIANRFRCQDE | | | X | P36544 |
| 2076 | 2120 | YNPLERPVANDSQP | | | X | P36544 |
| 2077 | 2121 | DEKNQVLTTNIWL | | | X | P36544 |
| 2078 | 2122 | DILLYNS | | | X | P36544 |
| 2079 | 2123 | EKISLGI | | | X | P36544 |
| 2080 | 2124 | ERFYECCKEPYPD | | | X | P36544 |
| 2081 | 2125 | IPGKRSE | | | X | P36544 |
| 2082 | 2126 | KISLGIT | | | X | P36544 |
| 2083 | 2127 | KNYNPLE | | | X | P36544 |
| 2084 | 2128 | VKTVRFP | | | X | P36544 |
| 2085 | 2129 | YFSLSLLQIMDVD | | | X | P36544 |
| 2086 | 2130 | PEPAAPQQPTAEEE | | | X | P37088 |
| 2087 | 2131 | YGNCYTFNDKNNSN | | | X | P37088 |
| 2088 | 2132 | ACDQLALGVAALFG | | | X | P39086 |
| 2089 | 2133 | ACLGVSCVLFVIAR | | | X | P39086 |
| 2090 | 2134 | AEILKQILFMGMMT | | | X | P39086 |
| 2091 | 2135 | ALSTRIVGGIWWFF | | | X | P39086 |
| 2092 | 2136 | FEASRRACDQLALG | | | X | P39086 |
| 2093 | 2137 | FGPSHSSSVSAVQS | | | X | P39086 |
| 2094 | 2138 | GYCLDLLKELSNIL | | | X | P39086 |
| 2095 | 2139 | IDNPHVSSIIEKWS | | | X | P39086 |
| 2096 | 2140 | IFETVENEPVNVEE | | | X | P39086 |
| 2097 | 2141 | LKEMKKGKEFYVIF | | | X | P39086 |
| 2098 | 2142 | LLMESTSIEYVTQR | | | X | P39086 |
| 2099 | 2143 | LLNIDNPHVSSIIE | | | X | P39086 |
| 2100 | 2144 | LNSFWFGVGALMQQ | | | X | P39086 |
| 2101 | 2145 | PLYGNDRFEGYCLD | | | X | P39086 |
| 2102 | 2146 | QLALGVAALFGPSH | | | X | P39086 |
| 2103 | 2147 | SDKPLYGNDRFEGY | | | X | P39086 |
| 2104 | 2148 | SLQCHRHKPWRLGP | | | X | P39086 |
| 2105 | 2149 | TVENEPVNVEELAF | | | X | P39086 |
| 2106 | 2150 | GIFETVENEPVNVE | | | X | P39086 |
| 2107 | 2151 | NIKIKIRQLPSGNK | | | X | P39086 |
| 2108 | 2152 | RLLNIDNPHVSSII | | | X | P39086 |
| 2109 | 2153 | ARPRSPSPISTLSH | | | X | P41594 |
| 2110 | 2154 | CKENEYVFDEYTCK | | | X | P41594 |
| 2111 | 2155 | CMFVPKVYIILAKP | | | X | P41594 |
| 2112 | 2156 | CWTCTPCKENEYVF | | | X | P41594 |
| 2113 | 2157 | EFIRDSLISSEEEE | | | X | P41594 |
| 2114 | 2158 | ESRGLGAGAGAGGS | | | X | P41594 |
| 2115 | 2159 | FSVSLSATVALGCM | | | X | P41594 |
| 2116 | 2160 | GLGAGAGAGGSAGG | | | X | P41594 |
| 2117 | 2161 | IKLQSPDVKWFDDY | | | X | P41594 |
| 2118 | 2162 | IMNFKEMGKDYFDY | | | X | P41594 |
| 2119 | 2163 | QARAMVDIVKRYNW | | | X | P41594 |
| 2120 | 2164 | RPETNHRNPWFQEF | | | X | P41594 |
| 2121 | 2165 | PCKENEYVFDEYTC | | | X | P41594 |
| 2122 | 2166 | PQENSKYNKTCNSS | | | X | P41594 |
| 2123 | 2167 | RILAGSKKKICTKK | | | X | P41594 |
| 2124 | 2168 | RTDDDVPSLHSEPV | | | X | P41594 |
| 2125 | 2169 | WPTDDLTGCDLIPV | | | X | P41594 |
| 2126 | 2170 | AAEKNWQVTAVNIL | | | X | P42261 |
| 2127 | 2171 | APLTITLVREEVID | | | X | P42261 |
| 2128 | 2172 | FEEGRDQTTSDQSN | | | X | P42261 |
| 2129 | 2173 | GAFMQQGCDISPRS | | | X | P42261 |
| 2130 | 2174 | KGKYAYLLESTMNE | | | X | P42261 |
| 2131 | 2175 | KHDGIRKIGYWNED | | | X | P42261 |
| 2132 | 2176 | KIGYWNEDDKFVPA | | | X | P42261 |
| 2133 | 2177 | KKNANQFEGNDRYE | | | X | P42261 |
| 2134 | 2178 | KYAYLLESTMNEYI | | | X | P42261 |
| 2135 | 2179 | LNKFKESGANVTGF | | | X | P42261 |
| 2136 | 2180 | PLTITLVREEVIDF | | | X | P42261 |
| 2137 | 2181 | SAEPSVFVRTTEEG | | | X | P42261 |
| 2138 | 2182 | SKGKYAYLLESTMN | | | X | P42261 |
| 2139 | 2183 | SRFSPYEWHSEEFE | | | X | P42261 |
| 2140 | 2184 | VRKSKGKYAYLLES | | | X | P42261 |
| 2141 | 2185 | YAYLLESTMNEYIE | | | X | P42261 |
| 2142 | 2186 | YWNEDDKFVPAATD | | | X | P42261 |
| 2143 | 2187 | EHAAFRFALSQLTE | | | X | P42261 |
| 2144 | 2188 | VIDFSKPFMSLGIS | | | X | P42261 |
| 2145 | 2189 | AIFGFYDKKSVNTI | | | X | P42262 |
| 2146 | 2190 | IESAEDLSKQTEIA | | | X | P42262 |
| 2147 | 2191 | INPSSSQNSQNFAT | | | X | P42262 |
| 2148 | 2192 | LKKERRVILDCERD | | | X | P42262 |
| 2149 | 2193 | MLVALIEFCYKSRA | | | X | P42262 |
| 2150 | 2194 | NHEMLEGNERYEGY | | | X | P42262 |
| 2151 | 2195 | NPAVPWGQGVEIER | | | X | P42262 |
| 2152 | 2196 | PIESAEDLSKQTEI | | | X | P42262 |
| 2153 | 2197 | PYEWHTEEFEDGRE | | | X | P42262 |
| 2154 | 2198 | RFSPYEWHTEEFED | | | X | P42262 |
| 2155 | 2199 | ALHTSFVTPSFPTD | | | X | P42263 |
| 2156 | 2200 | ERYEGYCVDLAYEI | | | X | P42263 |
| 2157 | 2201 | FAFLLESTMNEYIE | | | X | P42263 |
| 2158 | 2202 | FVYLYDTERGFSIL | | | X | P42263 |
| 2159 | 2203 | GFSILQAIMEAAVQ | | | X | P42263 |
| 2160 | 2204 | LGLLGHSHGGFPNT | | | X | P42263 |
| 2161 | 2205 | NITGFQIVNNENPM | | | X | P42263 |
| 2162 | 2206 | PFSDQQISNDSASS | | | X | P42263 |
| 2163 | 2207 | RIKYKLSIVGDGKY | | | X | P42263 |
| 2164 | 2208 | RKSKGKFAFLLEST | | | X | P42263 |
| 2165 | 2209 | RQEKRYLIDCEVER | | | X | P42263 |
| 2166 | 2210 | SIVGDGKYGARDPE | | | X | P42263 |
| 2167 | 2211 | SKGKFAFLLESTMN | | | X | P42263 |
| 2168 | 2212 | SRGVYAIFGFYDQM | | | X | P42263 |
| 2169 | 2213 | TQNFKPAPATNTQN | | | X | P42263 |
| 2170 | 2214 | VTPSFPTDADVQFV | | | X | P42263 |
| 2171 | 2215 | YKLSIVGDGKYGAR | | | X | P42263 |
| 2172 | 2216 | KFAFLLESTMNEYI | | | X | P42263 |
| 2173 | 2217 | VRKSKGKFAFLLES | | | X | P42263 |
| 2174 | 2218 | GKFAFLLESTMNEY | | | X | P42263 |
| 2175 | 2219 | DGRKFFFIRAIPQG | | | X | P42658 |
| 2176 | 2220 | ENDLDESQVPDQPS | | | X | P43146 |
| 2177 | 2221 | LDESQVPDQPSSLH | | | X | P43146 |
| 2178 | 2222 | NPLLPPPMSAIEPK | | | X | P43146 |
| 2179 | 2223 | VPDLSTPMLPPVGV | | | X | P43146 |
| 2180 | 2224 | ADHLKAEDTDF | | | X | P43681 |
| 2181 | 2225 | CCAEIYPDITY | | | X | P43681 |
| 2182 | 2226 | DAVGTYNTRKY | | | X | P43681 |
| 2183 | 2227 | EDTDFSVKEDW | | | X | P43681 |
| 2184 | 2228 | FWESGEWVIVD | | | X | P43681 |
| 2185 | 2229 | GTYNTRKYECCAEI | | | X | P43681 |
| 2186 | 2230 | KKLFSGYNKWSRPV | | | X | P43681 |
| 2187 | 2231 | KSPSDQLPPQQPLE | | | X | P43681 |
| 2188 | 2232 | LDFWESGEWVI | | | X | P43681 |
| 2189 | 2233 | LLLMKRPSVVK | | | X | P43681 |
| 2190 | 2234 | LMKRPSVVKDN | | | X | P43681 |
| 2191 | 2235 | NVTSIRIPSEL | | | X | P43681 |
| 2192 | 2236 | RKYECCAEIYP | | | X | P43681 |
| 2193 | 2237 | RSRSIQYCVPR | | | X | P43681 |
| 2194 | 2238 | RWDPADYENVT | | | X | P43681 |
| 2195 | 2239 | SCSIDVTFFPFDQQ | | | X | P43681 |
| 2196 | 2240 | TGLLRASSHVETRA | | | X | P43681 |
| 2197 | 2241 | VGLFLPPWLAG | | | X | P43681 |
| 2198 | 2242 | YECCAEIYPDI | | | X | P43681 |
| 2199 | 2243 | YNKWSRPVANISDV | | | X | P43681 |
| 2200 | 2244 | ADGQAAGALASRN | | | X | P43681 |
| 2201 | 2245 | LPPPDQP | | | X | P43681 |
| 2202 | 2246 | LPPPDQPSPCKCT | | | X | P43681 |
| 2203 | 2247 | PPPDQPS | | | X | P43681 |
| 2204 | 2248 | SIQYCVPRDDAAP | | | X | P43681 |
| 2205 | 2249 | TPPAIYK | | | X | P43681 |
| 2206 | 2250 | WDPADYE | | | X | P43681 |
| 2207 | 2251 | DDGTLLYTMRLTVQ | | | X | P47869 |
| 2208 | 2252 | GLGDSITEVFTNIY | | | X | P47869 |
| 2209 | 2253 | MHLEDFPMDAHSCP | | | X | P47869 |
| 2210 | 2254 | SRLNQYDLLGQSIG | | | X | P47869 |
| 2211 | 2255 | VMIQNNAYAVAVAN | | | X | P47869 |
| 2212 | 2256 | VQAECPMHLEDFPM | | | X | P47869 |
| 2213 | 2257 | AVCAQSVNDPSNMS | | | X | P47870 |
| 2214 | 2258 | LMGCFVFVFMALLE | | | X | P47870 |
| 2215 | 2259 | TLEIKNEMATSEAV | | | X | P47870 |
| 2216 | 2260 | VNDPSNMSLVKETV | | | X | P47870 |
| 2217 | 2261 | DLARVPANSTSNIL | | | X | P48167 |
| 2218 | 2262 | DIYVTSFGPVSDVE | | | X | P48169 |
| 2219 | 2263 | NKESVPARTVFGIT | | | X | P48169 |
| 2220 | 2264 | TGKLSATPPPSAPP | | | X | P48169 |
| 2221 | 2265 | VCLNESPGQNQKEE | | | X | P48169 |
| 2222 | 2266 | AGVLTIAMPVPVIV | | | X | P48547 |
| 2223 | 2267 | AHSHFDYDPRADEF | | | X | P48547 |
| 2224 | 2268 | ALAGVLTIAMPVPV | | | X | P48547 |
| 2225 | 2269 | CPADVCGPLYEEEL | | | X | P48547 |
| 2226 | 2270 | DTCPLAQEEILEIN | | | X | P48547 |
| 2227 | 2271 | DVCGPLYEEELAFW | | | X | P48547 |
| 2228 | 2272 | EVGLSGLSSKAAKD | | | X | P48547 |
| 2229 | 2273 | GALCALAGVLTIAM | | | X | P48547 |
| 2230 | 2274 | HILNYYRTGKLHCP | | | X | P48547 |
| 2231 | 2275 | KLHCPADVCGPLYE | | | X | P48547 |
| 2232 | 2276 | LAGVLTIAMPVPVI | | | X | P48547 |
| 2233 | 2277 | LCALAGVLTIAMPV | | | X | P48547 |
| 2234 | 2278 | SLAMAKQKLPKKKK | | | X | 48547 |
| 2235 | 2279 | KQKLPKKKKKHIPR | | | X | P48547 |
| 2236 | 2280 | SHFDYDPRADEFFF | | | X | P48547 |
| 2237 | 2281 | YSLAMAKQKLPKKK | | | X | P48547 |
| 2238 | 2282 | FKQFKTQYSTRVVT | | | X | P48664 |
| 2239 | 2283 | RTENGSEPGASMPP | | | X | P48664 |
| 2240 | 2284 | TLQEMLSFEETVPV | | | X | P48664 |
| 2241 | 2285 | EITIGAEPKETTED | | | X | P49418 |
| 2242 | 2286 | LFTMQTDQSMICNL | | | X | P49418 |
| 2243 | 2287 | QDAGWLVGVKESDW | | | X | P49418 |
| 2244 | 2288 | FRNFTSATQALTEW | | | X | P51168 |
| 2245 | 2289 | GEPYSPCTVNGSEV | | | X | P51168 |
| 2246 | 2290 | NYDSLRLQPLDVIE | | | X | P51168 |
| 2247 | 2291 | EEEYNPFLVSSTGA | | | X | P51170 |
| 2248 | 2292 | GLQVILYINEEEYN | | | X | P51170 |
| 2249 | 2293 | ILYINEEEYNPFLV | | | X | P51170 |
| 2250 | 2294 | INEEEYNPFLVSST | | | X | P51170 |
| 2251 | 2295 | LQVILYINEEEYNP | | | X | P51170 |
| 2252 | 2296 | QVPLEKKINMSYSA | | | X | P51170 |
| 2253 | 2297 | RPGITHGVGLVLRV | | | X | P51172 |
| 2254 | 2298 | DAVNESGRVEFGSY | | | X | P51787 |
| 2255 | 2299 | GARLNRVEDKVTQL | | | X | P51787 |
| 2256 | 2300 | HITCDPPEERRLDH | | | X | P51787 |
| 2257 | 2301 | SYADALWWGVVTVT | | | X | P51787 |
| 2258 | 2302 | PKKSVVVKKKKFKL | | | X | P51787 |
| 2259 | 2303 | SPKPKKSVVVKKKK | | | X | P51787 |
| 2260 | 2304 | FNRQIPAAASLIQT | | | X | P51787 |
| 2261 | 2305 | QKHFNRQIPAAASL | | | X | P51787 |
| 2262 | 2306 | QLEDACEHLAEYLE | | | X | P54284 |
| 2263 | 2307 | QCPPESFDVILDEN | | | X | P54284 |
| 2264 | 2308 | CGNCSRIFHGEKLM | | | X | P54289 |
| 2265 | 2309 | CSRIFHGEKLMNTN | | | X | P54289 |
| 2266 | 2310 | DCKRNSDVMDC | | | X | P54289 |
| 2267 | 2311 | DDFVNVASFNS | | | X | P54289 |
| 2268 | 2312 | DIKRLTPRFTL | | | X | P54289 |
| 2269 | 2313 | ENPETYEDSFY | | | X | P54289 |
| 2270 | 2314 | FRTLVKSQDERYID | | | X | P54289 |
| 2271 | 2315 | FTLCPNGYYFAIDP | | | X | P54289 |
| 2272 | 2316 | GEKLMNTNLIFIMV | | | X | P54289 |
| 2273 | 2317 | GRFFGEIDPSL | | | X | P54289 |
| 2274 | 2318 | IEDANFGRQIS | | | X | P54289 |
| 2275 | 2319 | IFHGEKLMNTNLIF | | | X | P54289 |
| 2276 | 2320 | IFIMVESKGTCPCD | | | X | P54289 |
| 2277 | 2321 | IPSIGAIRINTQEY | | | X | P54289 |
| 2278 | 2322 | LCPNGYYFAID | | | X | P54289 |
| 2279 | 2323 | LIGPSSEEPFPSAV | | | X | P54289 |
| 2280 | 2324 | PNGYYFAIDPN | | | X | P54289 |
| 2281 | 2325 | QEYLDVLGRPM | | | X | P54289 |
| 2282 | 2326 | QIGRFFGEIDP | | | X | P54289 |
| 2283 | 2327 | RIKPVFIEDANFGR | | | X | P54289 |
| 2284 | 2328 | SLSKQSCITEQ | | | X | P54289 |
| 2285 | 2329 | SSEEPFPSAVT | | | X | P54289 |
| 2286 | 2330 | TLSDDDFVNVASFN | | | X | P54289 |
| 2287 | 2331 | TLTLFQSLLIG | | | X | P54289 |
| 2288 | 2332 | TLVKSQDERYI | | | X | P54289 |
| 2289 | 2333 | VCFDNNVLEDY | | | X | P54289 |
| 2290 | 2334 | VEMEDDDFTAS | | | X | P54289 |
| 2291 | 2335 | VKSQDERYIDK | | | X | P54289 |
| 2292 | 2336 | DYCNDLKISDNNTE | | | X | P54289 |
| 2293 | 2337 | HGEKLMNTNLIFIM | | | X | P54289 |
| 2294 | 2338 | PDNFEESGYTFIAP | | | X | P54289 |
| 2295 | 2339 | TLKPDNFEESGYTF | | | X | P54289 |
| 2296 | 2340 | VLNELNWTSALDEV | | | X | P54289 |
| 2297 | 2341 | ALLGISFFALPAGI | | | X | P56696 |
| 2298 | 2342 | CVIDFIVFVASVAV | | | X | P56696 |
| 2299 | 2343 | ELVALTAVQSEQGE | | | X | P56696 |
| 2300 | 2344 | HQELANECLLILEF | | | X | P56696 |
| 2301 | 2345 | LANECLLILEFVMI | | | X | P56696 |
| 2302 | 2346 | MIVVFGLEYIVRVW | | | X | P56696 |
| 2303 | 2347 | PRAELVALTAVQSE | | | X | P56696 |
| 2304 | 2348 | PSKQHLAPPTMPTS | | | X | P56696 |
| 2305 | 2349 | QTLSISRSVSTNMD | | | X | P56696 |
| 2306 | 2350 | RIRMGSSQRRTGPS | | | X | P56696 |
| 2307 | 2351 | YQCELTVDDIMPAV | | | X | P56696 |
| 2308 | 2352 | AELVALTAVQSEQG | | | X | P56696 |
| 2309 | 2353 | VALTAVQSEQGEAG | | | X | P56696 |
| 2310 | 2354 | EYFLEPEINLVTEN | | | X | P62955 |
| 2311 | 2355 | LEPEINLVTENTEN | | | X | P62955 |
| 2312 | 2356 | CFVFCFCALLEFAV | | | X | P78334 |
| 2313 | 2357 | IAICFVFCFCALLE | | | X | P78334 |
| 2314 | 2358 | KCQKEAKRSSADKG | | | X | P78348 |
| 2315 | 2359 | KRSSADKGVALSLD | | | X | P78348 |
| 2316 | 2360 | AAETQPVTDAS | | | X | Q00975 |
| 2317 | 2361 | AAETQPVTDASPMK | | | X | Q00975 |
| 2318 | 2362 | AEEVMLAEEDRNAE | | | X | Q00975 |
| 2319 | 2363 | AGPREAESGEE | | | X | Q00975 |
| 2320 | 2364 | ALEQHLPDGDKTPM | | | X | Q00975 |
| 2321 | 2365 | ASCEALYSEMDPEE | | | X | Q00975 |
| 2322 | 2366 | CAVGSPFARAS | | | X | Q00975 |
| 2323 | 2367 | CEALYSEMDPE | | | X | Q00975 |
| 2324 | 2368 | CRGQYLDYEKEEVE | | | X | Q00975 |
| 2325 | 2369 | CRRERERRQER | | | X | Q00975 |
| 2326 | 2370 | DEFIRVWAEYDPAA | | | X | Q00975 |
| 2327 | 2371 | EATVVPSGNVD | | | X | Q00975 |
| 2328 | 2372 | ETQPVTDASPM | | | X | Q00975 |
| 2329 | 2373 | FYDAPYEYELM | | | X | Q00975 |
| 2330 | 2374 | GPGGGERARGGGAG | | | X | Q00975 |
| 2331 | 2375 | GPLGEATVVPS | | | X | Q00975 |
| 2332 | 2376 | ITRRGPDGEPQ | | | X | Q00975 |
| 2333 | 2377 | KELERDCRGQYLDY | | | X | Q00975 |
| 2334 | 2378 | KHSVDATYEEQ | | | X | Q00975 |
| 2335 | 2379 | KQNCFTVNRSLFVF | | | X | Q00975 |
| 2336 | 2380 | LCEGDTECREY | | | X | Q00975 |
| 2337 | 2381 | LFGGQFNFQDE | | | X | Q00975 |
| 2338 | 2382 | LGEATVVPSGN | | | X | Q00975 |
| 2339 | 2383 | LPDGDKTPMSE | | | X | Q00975 |
| 2340 | 2384 | LTFEEAVATNS | | | X | Q00975 |
| 2341 | 2385 | LTKDEEEMEEA | | | X | Q00975 |
| 2342 | 2386 | MKFYDAPYEYE | | | X | Q00975 |
| 2343 | 2387 | MPRLAAETQPV | | | X | Q00975 |
| 2344 | 2388 | NAQELTKDEEE | | | X | Q00975 |
| 2345 | 2389 | PDEMTVGKVYA | | | X | Q00975 |
| 2346 | 2390 | PEAAEAPEGVD | | | X | Q00975 |
| 2347 | 2391 | PLVVELGRDGA | | | X | Q00975 |
| 2348 | 2392 | PVGDFPCGKEA | | | X | Q00975 |
| 2349 | 2393 | RDCRGQYLDYE | | | X | Q00975 |
| 2350 | 2394 | REPRRHRAHRH | | | X | Q00975 |
| 2351 | 2395 | RLCEGDTECREYWP | | | X | Q00975 |
| 2352 | 2396 | RPPLERGHSTEIPV | | | X | Q00975 |
| 2353 | 2397 | RRGPDGEPQPGLES | | | X | Q00975 |
| 2354 | 2398 | RVAYKRLVRMNMPI | | | X | Q00975 |
| 2355 | 2399 | SADMDGAPSSA | | | X | Q00975 |
| 2356 | 2400 | SERGRGPGPEG | | | X | Q00975 |
| 2357 | 2401 | SFYFIVLTLFGNYT | | | X | Q00975 |
| 2358 | 2402 | SLEKGPSLSAD | | | X | Q00975 |
| 2359 | 2403 | SSSSSEKQRFY | | | X | Q00975 |
| 2360 | 2404 | SVSWGTQRTQD | | | X | Q00975 |
| 2361 | 2405 | TGCRRERERRQ | | | X | Q00975 |
| 2362 | 2406 | THLCSTTPDRP | | | X | Q00975 |
| 2363 | 2407 | VFLRQKSSTSLSNG | | | X | Q00975 |
| 2364 | 2408 | VLKHSVDATYE | | | X | Q00975 |
| 2365 | 2409 | VLMMKFYDAPYEYE | | | X | Q00975 |
| 2366 | 2410 | VMLTGPLGEATVVP | | | X | Q00975 |
| 2367 | 2411 | VRFGDELGGRY | | | X | Q00975 |
| 2368 | 2412 | VYAALMIFDFY | | | X | Q00975 |
| 2369 | 2413 | YKRLVRMNMPI | | | X | Q00975 |
| 2370 | 2414 | GGAIQNQESGIKES | | | X | Q00975 |
| 2371 | 2415 | GIKIIALGFVFHKG | | | X | Q00975 |
| 2372 | 2416 | HHHRCHRRRDRKQR | | | X | Q00975 |
| 2373 | 2417 | NLANAQELTKDEEE | | | X | Q00975 |
| 2374 | 2418 | QERRQPSSSSSEKQ | | | X | Q00975 |
| 2375 | 2419 | RNVTRMGSQPPDPN | | | X | Q00975 |
| 2376 | 2420 | SSSSSEKQRFYSCD | | | X | Q00975 |
| 2377 | 2421 | ALAIYIPFPED | | | X | Q01668 |
| 2378 | 2422 | ANCVALAIYIPFPE | | | X | Q01668 |
| 2379 | 2423 | CLAMQHYEQSKMFN | | | X | Q01668 |
| 2380 | 2424 | CLGEQEYFSSEECY | | | X | Q01668 |
| 2381 | 2425 | CQAISKSKLSRRWR | | | X | Q01668 |
| 2382 | 2426 | CVALAIYIPFPEDD | | | X | Q01668 |
| 2383 | 2427 | DACDLTIDEME | | | X | Q01668 |
| 2384 | 2428 | DDDSPVCYDSRRSP | | | X | Q01668 |
| 2385 | 2429 | DDSNSTNHNLE | | | X | Q01668 |
| 2386 | 2430 | DDYREEDEDKD | | | X | Q01668 |
| 2387 | 2431 | DEEPDPGRDEEDLA | | | X | Q01668 |
| 2388 | 2432 | DFGPGYSDEEP | | | X | Q01668 |
| 2389 | 2433 | DIFILLAIFANCVA | | | X | Q01668 |
| 2390 | 2434 | DPESDYNPGEE | | | X | Q01668 |
| 2391 | 2435 | DPYPPCDVPVGEEE | | | X | Q01668 |
| 2392 | 2436 | DVPVGEEEEEE | | | X | Q01668 |
| 2393 | 2437 | DVPVGEEEEEEEED | | | X | Q01668 |
| 2394 | 2438 | EDKDPYPPCDVPVG | | | X | Q01668 |
| 2395 | 2439 | EEEEEDEPEVP | | | X | Q01668 |
| 2396 | 2440 | EEEEEEEDEPE | | | X | Q01668 |
| 2397 | 2441 | EEEEEEEDEPEVPA | | | X | Q01668 |
| 2398 | 2442 | EEPDPGRDEED | | | X | Q01668 |
| 2399 | 2443 | EKVEYAFLIIFTVE | | | X | Q01668 |
| 2400 | 2444 | EPEETKREEED | | | X | Q01668 |
| 2401 | 2445 | EQEYFSSEECY | | | X | Q01668 |
| 2402 | 2446 | EQEYFSSEECYEDD | | | X | Q01668 |
| 2403 | 2447 | ESDYNPGEEYT | | | X | Q01668 |
| 2404 | 2448 | ETESVNTENVSGEG | | | X | Q01668 |
| 2405 | 2449 | EVPAGPRPRRI | | | X | Q01668 |
| 2406 | 2450 | EYFSSEECYED | | | X | Q01668 |
| 2407 | 2451 | FGIQSSAISVV | | | X | Q01668 |
| 2408 | 2452 | FLEDDDSPVCY | | | X | Q01668 |
| 2409 | 2453 | FNFECLRRQSSQEE | | | X | Q01668 |
| 2410 | 2454 | FQCITMEGWTDVLY | | | X | Q01668 |
| 2411 | 2455 | FRNTILGYFDY | | | X | Q01668 |
| 2412 | 2456 | GCHKLINHHIF | | | X | Q01668 |
| 2413 | 2457 | GEEEEEEEEDE | | | X | Q01668 |
| 2414 | 2458 | GGEEGKRNTSMPTS | | | X | Q01668 |
| 2415 | 2459 | GYSDEEPDPGRDEE | | | X | Q01668 |
| 2416 | 2460 | HPQGFLEDDDS | | | X | Q01668 |
| 2417 | 2461 | HVNSDRRDSLQ | | | X | Q01668 |
| 2418 | 2462 | IADACDLTIDEMES | | | X | Q01668 |
| 2419 | 2463 | ILNMVFTGVFTVEM | | | X | Q01668 |
| 2420 | 2464 | ILYKDGDVDSP | | | X | Q01668 |
| 2421 | 2465 | IPFPEDDSNSTNHN | | | X | Q01668 |
| 2422 | 2466 | IVAEEDPAPCA | | | X | Q01668 |
| 2423 | 2467 | KGKFYRCTDEAKSN | | | X | Q01668 |
| 2424 | 2468 | KQRSADSLVEA | | | X | Q01668 |
| 2425 | 2469 | KRQQYAKSKKQGNS | | | X | Q01668 |
| 2426 | 2470 | KSKLSRRWRRW | | | X | Q01668 |
| 2427 | 2471 | KVTIDDYREED | | | X | Q01668 |
| 2428 | 2472 | LEEDLKGYLDW | | | X | Q01668 |
| 2429 | 2473 | LFILYKDGDVD | | | X | Q01668 |
| 2430 | 2474 | LKMTTFGAFLH | | | X | Q01668 |
| 2431 | 2475 | LQDDEPEETKREEE | | | X | Q01668 |
| 2432 | 2476 | LQDFGPGYSDEEPD | | | X | Q01668 |
| 2433 | 2477 | LREKQQLEEDL | | | X | Q01668 |
| 2434 | 2478 | LSRRWRRWNRFNRR | | | X | Q01668 |
| 2435 | 2479 | LTIDEMESAASTLL | | | X | Q01668 |
| 2436 | 2480 | MMKKMQHQRQQQAD | | | X | Q01668 |
| 2437 | 2481 | MPTSETESVNTENV | | | X | Q01668 |
| 2438 | 2482 | MVFTGVFTVEM | | | X | Q01668 |
| 2439 | 2483 | NKVTIDDYREEDED | | | X | Q01668 |
| 2440 | 2484 | NMKEKIAPIPE | | | X | Q01668 |
| 2441 | 2485 | NMKEKIAPIPEGSA | | | X | Q01668 |
| 2442 | 2486 | NSDRRDSLQQT | | | X | Q01668 |
| 2443 | 2487 | PCDVPVGEEEE | | | X | Q01668 |
| 2444 | 2488 | PDPGRDEEDLADEM | | | X | Q01668 |
| 2445 | 2489 | PEDDSNSTNHN | | | X | Q01668 |
| 2446 | 2490 | PEDDSNSTNHNLEK | | | X | Q01668 |
| 2447 | 2491 | PPASDTEKPLFPPA | | | X | Q01668 |
| 2448 | 2492 | PPCDVPVGEEEEEE | | | X | Q01668 |
| 2449 | 2493 | PTSETESVNTENVS | | | X | Q01668 |
| 2450 | 2494 | PVGEEEEEEEE | | | X | Q01668 |
| 2451 | 2495 | QGFLEDDDSPV | | | X | Q01668 |
| 2452 | 2496 | QKLREKQQLEE | | | X | Q01668 |
| 2453 | 2497 | QLFKGKFYRCTDEA | | | X | Q01668 |
| 2454 | 2498 | QTVLSWQAAID | | | X | Q01668 |
| 2455 | 2499 | QVPTSTNANLNNAN | | | X | Q01668 |
| 2456 | 2500 | RAVIKKIWKKT | | | X | Q01668 |
| 2457 | 2501 | RGLFILYKDGDVDS | | | X | Q01668 |
| 2458 | 2502 | RSDSGDEQLPT | | | X | Q01668 |
| 2459 | 2503 | SELNMKEKIAPIPE | | | X | Q01668 |
| 2460 | 2504 | SQRKRQQYAKSKKQ | | | X | Q01668 |
| 2461 | 2505 | SRRSPRRRLLP | | | X | Q01668 |
| 2462 | 2506 | SSKQTVLSWQAAID | | | X | Q01668 |
| 2463 | 2507 | TESVNTENVSGEGE | | | X | Q01668 |
| 2464 | 2508 | TETILVELEIM | | | X | Q01668 |
| 2465 | 2509 | TIDDYREEDED | | | X | Q01668 |
| 2466 | 2510 | TSETESVNTEN | | | X | Q01668 |
| 2467 | 2511 | VETFLKIIAYG | | | X | Q01668 |
| 2468 | 2512 | VGEEEEEEEEDEPE | | | X | Q01668 |
| 2469 | 2513 | VIKKIWKKTSM | | | X | Q01668 |
| 2470 | 2514 | WITQAEDIDPE | | | X | Q01668 |
| 2471 | 2515 | YAFLIIFTVET | | | X | Q01668 |
| 2472 | 2516 | YAFTAIFTVEI | | | X | Q01668 |
| 2473 | 2517 | YFDYAFTAIFTVEI | | | X | Q01668 |
| 2474 | 2518 | YFRDPHCLGEQEYF | | | X | Q01668 |
| 2475 | 2519 | SMPTSETESVNTEN | | | X | Q01668 |
| 2476 | 2520 | AEDIDPENEEEGGE | | | X | Q01668 |
| 2477 | 2521 | CDLQDDEPEETKRE | | | X | Q01668 |
| 2478 | 2522 | EDDSNSTNHNLEKV | | | X | Q01668 |
| 2479 | 2523 | ESVNTENVSGEGEN | | | X | Q01668 |
| 2480 | 2524 | GEEEEEEEEDEPEV | | | X | Q01668 |
| 2481 | 2525 | IDDYREEDEDKDPY | | | X | Q01668 |
| 2482 | 2526 | ITQAEDIDPENEEE | | | X | Q01668 |
| 2483 | 2527 | LLDQVVPPAGDDEV | | | X | Q01668 |
| 2484 | 2528 | PASDTEKPLFPPAG | | | X | Q01668 |
| 2485 | 2529 | PCDVPVGEEEEEEE | | | X | Q01668 |
| 2486 | 2530 | QDFGPGYSDEEPDP | | | X | Q01668 |
| 2487 | 2531 | QGFLEDDDSPVCYD | | | X | Q01668 |
| 2488 | 2532 | RLFRVMRLVKLLSR | | | X | Q01668 |
| 2489 | 2533 | RQQYAKSKKQGNSS | | | X | Q01668 |
| 2490 | 2534 | VPPAGDDEVTVGKF | | | X | Q01668 |
| 2491 | 2535 | VPVGEEEEEEEEDE | | | X | Q01668 |
| 2492 | 2536 | GFLQEFSKEERDPV | | | X | Q02246 |
| 2493 | 2537 | GVSSSEMNVTWEPV | | | X | Q02246 |
| 2494 | 2538 | QLNLAAEDTRLFAP | | | X | Q02246 |
| 2495 | 2539 | SGLSGGGGAPGELI | | | X | Q02246 |
| 2496 | 2540 | TFTWTLDDFPIDFD | | | X | Q02246 |
| 2497 | 2541 | AQCPPEMFDIILDE | | | X | Q02641 |
| 2498 | 2542 | DACEHLAEYLEAYW | | | X | Q02641 |
| 2499 | 2543 | DMETDPSEGPG | | | X | Q02641 |
| 2500 | 2544 | EEDYEEELTDNRNR | | | X | Q02641 |
| 2501 | 2545 | EKLAQCPPEMFDII | | | X | Q02641 |
| 2502 | 2546 | GRFKRSDGSTSSDT | | | X | Q02641 |
| 2503 | 2547 | PPARQGSWEDE | | | X | Q02641 |
| 2504 | 2548 | PQGKYSKRKGRFKR | | | X | Q02641 |
| 2505 | 2549 | QGPYLASGDQPLER | | | X | Q02641 |
| 2506 | 2550 | RGPYPPSQEIPMEV | | | X | Q02641 |
| 2507 | 2551 | TPPARQGSWEDEEE | | | X | Q02641 |
| 2508 | 2552 | YLASGDQPLER | | | X | Q02641 |
| 2509 | 2553 | ARQGSWEDEEEDYE | | | X | Q02641 |
| 2510 | 2554 | DADTPGSRNSAYTE | | | X | Q02641 |
| 2511 | 2555 | EDEEEDYEEELTDN | | | X | Q02641 |
| 2512 | 2556 | GSWEDEEEDYEEEL | | | X | Q02641 |
| 2513 | 2557 | NVGYNPSPGDEVPV | | | X | Q02641 |
| 2514 | 2558 | RNKARYCAEGGGPV | | | X | Q02641 |
| 2515 | 2559 | TPGSRNSAYTELGD | | | X | Q02641 |
| 2516 | 2560 | KRSDGSTSSDTTSN | | | X | Q02641 |
| 2517 | 2561 | ADVCGPLFEEELTF | | | X | Q03721 |
| 2518 | 2562 | LRDLPLQHSPEAAC | | | X | Q03721 |
| 2519 | 2563 | RREVETEPILTYIE | | | X | Q03721 |
| 2520 | 2564 | HCPADVCGPLFEEE | | | X | Q03721 |
| 2521 | 2565 | CCPDTLDFVKNLLN | | | X | Q03721 |
| 2522 | 2566 | DHTDFKNIPIGFWW | | | X | Q03721 |
| 2523 | 2567 | EELTFWGIDETDVE | | | X | Q03721 |
| 2524 | 2568 | FLVRIVCCPDTLDF | | | X | Q03721 |
| 2525 | 2569 | KQKLPKKRKKHVPR | | | X | Q03721 |
| 2526 | 2570 | LFEEELTFWGIDET | | | X | Q03721 |
| 2527 | 2571 | TLEFLVRIVCCPDT | | | X | Q03721 |
| 2528 | 2572 | AGGQKCTVSIN | | | X | Q04844 |
| 2529 | 2573 | ALVLFSVGSSLIFL | | | X | Q04844 |
| 2530 | 2574 | AYTENGEWAID | | | X | Q04844 |
| 2531 | 2575 | AYTENGEWAIDFCP | | | X | Q04844 |
| 2532 | 2576 | CCVDAVNFVAE | | | X | Q04844 |
| 2533 | 2577 | DTEAYTENGEWAID | | | X | Q04844 |
| 2534 | 2578 | IFRSQTYNAEEVEF | | | X | Q04844 |
| 2535 | 2579 | LGVLLLLGLLG | | | X | Q04844 |
| 2536 | 2580 | NNYDPGSRPVREPE | | | X | Q04844 |
| 2537 | 2581 | PPRRASSVGLL | | | X | Q04844 |
| 2538 | 2582 | SQTYNAEEVEF | | | X | Q04844 |
| 2539 | 2583 | TYNAEEVEFTF | | | X | Q04844 |
| 2540 | 2584 | VCAVEVTYFPFDWQ | | | X | Q04844 |
| 2541 | 2585 | VDAVNFVAEST | | | X | Q04844 |
| 2542 | 2586 | VGLLLRAEELILKK | | | X | Q04844 |
| 2543 | 2587 | VRCCVDAVNFV | | | X | Q04844 |
| 2544 | 2588 | VRCCVDAVNFVAES | | | X | Q04844 |
| 2545 | 2589 | KKPRSELVFEGQR | | | X | Q04844 |
| 2546 | 2590 | LGAAAPEVRCCVD | | | X | Q04844 |
| 2547 | 2591 | LGLLGRGVGKNEE | | | X | Q04844 |
| 2548 | 2592 | NAEEVEFTFAVDN | | | X | Q04844 |
| 2549 | 2593 | TENGEWAIDFCPG | | | X | Q04844 |
| 2550 | 2594 | TLTTSVW | | | X | Q04844 |
| 2551 | 2595 | YSLIIRR | | | X | Q04844 |
| 2552 | 2596 | ERESKAEKVLQFDP | | | X | Q05586 |
| 2553 | 2597 | FSWGVLLNSGIGEG | | | X | Q05586 |
| 2554 | 2598 | GETEKPRGYQMSTR | | | X | Q05586 |
| 2555 | 2599 | GINDPRLRNPSDKF | | | X | Q05586 |
| 2556 | 2600 | GSWKIQLNATSVTH | | | X | Q05586 |
| 2557 | 2601 | LHAFIWDSAVLEFE | | | X | Q05586 |
| 2558 | 2602 | LLEERESKAEKVLQ | | | X | Q05586 |
| 2559 | 2603 | MLYLLDRFSPFGRF | | | X | Q05586 |
| 2560 | 2604 | NDHFTPTPVSYTAG | | | X | Q05586 |
| 2561 | 2605 | PLTINNERAQYIEF | | | X | Q05586 |
| 2562 | 2606 | RFKVNSEEEEEDAL | | | X | Q05586 |
| 2563 | 2607 | RRSSKDTSTGGGRG | | | X | Q05586 |
| 2564 | 2608 | SDDHEGRAAQKRLE | | | X | Q05586 |
| 2565 | 2609 | FDPGTKNVTALLME | | | X | Q05586 |
| 2566 | 2610 | KLHAFIWDSAVLEF | | | X | Q05586 |
| 2567 | 2611 | SEEEEEDALTLSSA | | | X | Q05586 |
| 2568 | 2612 | LPDFMLVLIVL | | | X | Q05901 |
| 2569 | 2613 | SSSTYHPMAPW | | | X | Q05901 |
| 2570 | 2614 | TVFVINVHHRSSST | | | X | Q05901 |
| 2571 | 2615 | VLFENADGRFE | | | X | Q05901 |
| 2572 | 2616 | KEESQPV | | | X | Q05901 |
| 2573 | 2617 | LIVLGIPSSATTG | | | X | Q05901 |
| 2574 | 2618 | YFGLKISQLVDVD | | | X | Q05901 |
| 2575 | 2619 | ARRPPASSEQAQQE | | | X | Q07001 |
| 2576 | 2620 | IIRRKPLFYII | | | X | Q07001 |
| 2577 | 2621 | LGYISKAEEYF | | | X | Q07001 |
| 2578 | 2622 | NQPPPQPFPGDPYS | | | X | Q07001 |
| 2579 | 2623 | NVDPRAPLDSP | | | X | Q07001 |
| 2580 | 2624 | PASSEQAQQEL | | | X | Q07001 |
| 2581 | 2625 | PPASSEQAQQELFN | | | X | Q07001 |
| 2582 | 2626 | PPQPFPGDPYSYNV | | | X | Q07001 |
| 2583 | 2627 | PQPFPGDPYSY | | | X | Q07001 |
| 2584 | 2628 | PSPGALVRRSSSLG | | | X | Q07001 |
| 2585 | 2629 | QNCSLKFSSLK | | | X | Q07001 |
| 2586 | 2630 | RRKPLFYIINI | | | X | Q07001 |
| 2587 | 2631 | VEWIIIDPEGF | | | X | Q07001 |
| 2588 | 2632 | VRRSSSLGYISKAE | | | X | Q07001 |
| 2589 | 2633 | FSSLKYT | | | X | Q07001 |
| 2590 | 2634 | IRRKPLFYIINIL | | | X | Q07001 |
| 2591 | 2635 | NYNEEKDSWNRVA | | | X | Q07001 |
| 2592 | 2636 | PFPGDPYSYNVQD | | | X | Q07001 |
| 2593 | 2637 | VYNQPPPQPFPGD | | | X | Q07001 |
| 2594 | 2638 | AEEEPSVEPVK | | | X | Q08289 |
| 2595 | 2639 | DACEHLADYLEAYW | | | X | Q08289 |
| 2596 | 2640 | DREAVRREAERQAQ | | | X | Q08289 |
| 2597 | 2641 | GTSRGLSRQET | | | X | Q08289 |
| 2598 | 2642 | HKSKDRYCEKDGEV | | | X | Q08289 |
| 2599 | 2643 | QLEDACEHLADYLE | | | X | Q08289 |
| 2600 | 2644 | RKSTPPSSAID | | | X | Q08289 |
| 2601 | 2645 | RSGTSRGLSRQ | | | X | Q08289 |
| 2602 | 2646 | STPPSSAIDID | | | X | Q08289 |
| 2603 | 2647 | HDHVDHYASHRDHN | | | X | Q08289 |
| 2604 | 2648 | PTLASNSQGSQGDQ | | | X | Q08289 |
| 2605 | 2649 | VDHYASHRDHNHRD | | | X | Q08289 |
| 2606 | 2650 | ELGEEAMEKFREDE | | | X | Q09470 |
| 2607 | 2651 | KSEYMEIEEDMNNS | | | X | Q09470 |
| 2608 | 2652 | MFSEEIKFYELGEE | | | X | Q09470 |
| 2609 | 2653 | MSGENVDEASAAPG | | | X | Q09470 |
| 2610 | 2654 | MTVMSGENVDEASA | | | X | Q09470 |
| 2611 | 2655 | PLDMFSEEIKFYEL | | | X | Q09470 |
| 2612 | 2656 | SAAPGHPQDGSYPR | | | X | Q09470 |
| 2613 | 2657 | SNIFTDPFFIVETL | | | X | Q09470 |
| 2614 | 2658 | AAQIAQALLGAEER | | | X | Q12809 |
| 2615 | 2659 | ALLALTARESSVRS | | | X | Q12809 |
| 2616 | 2660 | CELCGYSRAEVMQR | | | X | Q12809 |
| 2617 | 2661 | ENCAVIYCNDGFCE | | | X | Q12809 |
| 2618 | 2662 | FDLLIFGSGSEELI | | | X | Q12809 |
| 2619 | 2663 | FLCLVDVVPVKNED | | | X | Q12809 |
| 2620 | 2664 | GEPLMEDCEKSSDT | | | X | Q12809 |
| 2621 | 2665 | IPGSPGSTELEGGF | | | X | Q12809 |
| 2622 | 2666 | KLPALLALTARESS | | | X | Q12809 |
| 2623 | 2667 | LIAHWLACIWYAIG | | | X | Q12809 |
| 2624 | 2668 | LQADICLHLNRSLL | | | X | Q12809 |
| 2625 | 2669 | LTSVGFGNVSPNTN | | | X | Q12809 |
| 2626 | 2670 | LVRVARKLDRYSEY | | | X | Q12809 |
| 2627 | 2671 | RDDLLEVLDMYPEF | | | X | Q12809 |
| 2628 | 2672 | RRRTDKDTEQPGEV | | | X | Q12809 |
| 2629 | 2673 | SPGSTELEGGFSRQ | | | X | Q12809 |
| 2630 | 2674 | SSVRSGGAGGAGAP | | | X | Q12809 |
| 2631 | 2675 | MIPGSPGSTELEGG | | | X | Q12809 |
| 2632 | 2676 | PALLALTARESSVR | | | X | Q12809 |
| 2633 | 2677 | PQEGPTRRLSLPGQ | | | X | Q12809 |
| 2634 | 2678 | PYSAAFLLKETEEG | | | X | Q12809 |
| 2635 | 2679 | SRQRKRKLSFRRRT | | | X | Q12809 |
| 2636 | 2680 | ASCYGQMERPEVPM | | | X | Q12879 |
| 2637 | 2681 | DQYKLYSKHFTLKD | | | X | Q12879 |
| 2638 | 2682 | EAKASCYGQMERPE | | | X | Q12879 |
| 2639 | 2683 | FTGVCSDRPGLLFS | | | X | Q12879 |
| 2640 | 2684 | GKAPHGPSFTIGKA | | | X | Q12879 |
| 2641 | 2685 | IYDAAVLNYKAGRD | | | X | Q12879 |
| 2642 | 2686 | KAIWLLWGLVFNNS | | | X | Q12879 |
| 2643 | 2687 | KEFPSGLISVSYDD | | | X | Q12879 |
| 2644 | 2688 | KFVKINNSTNEGMN | | | X | Q12879 |
| 2645 | 2689 | LAKGKAPHGPSFTI | | | X | Q12879 |
| 2646 | 2690 | LALLQFVGDGEMEE | | | X | Q12879 |
| 2647 | 2691 | LISVSYDDWDYSLE | | | X | Q12879 |
| 2648 | 2692 | LWLTGICHNEKNEV | | | X | Q12879 |
| 2649 | 2693 | NSVPVQNPKGTTSK | | | X | Q12879 |
| 2650 | 2694 | PHGPSFTIGKAIWL | | | X | Q12879 |
| 2651 | 2695 | PVQNPKGTTSKIMV | | | X | Q12879 |
| 2652 | 2696 | TIGKAIWLLWGLVF | | | X | Q12879 |
| 2653 | 2697 | VENNSVPVQNPKGT | | | X | Q12879 |
| 2654 | 2698 | WGLVFNNSVPVQNP | | | X | Q12879 |
| 2655 | 2699 | WLLWGLVFNNSVPV | | | X | Q12879 |
| 2656 | 2700 | PCRKFVKINNSTNE | | | X | Q12879 |
| 2657 | 2701 | AAAMALSLITFIWE | | | X | Q12879 |
| 2658 | 2702 | SNRRVYKKMPSIES | | | X | Q12879 |
| 2659 | 2703 | TLPENVDFPDPYQD | | | X | Q12879 |
| 2660 | 2704 | GNGCPEEESKEASA | | | X | Q13002 |
| 2661 | 2705 | WWRGNGCPEEESKE | | | X | Q13002 |
| 2662 | 2706 | FAHIEEENFVNELL | | | X | Q13018 |
| 2663 | 2707 | FGAHLASFAHIEEE | | | X | Q13018 |
| 2664 | 2708 | DEAENAFLLEELFA | | | X | Q13018 |
| 2665 | 2709 | STVLDSMSFEAAHE | | | X | Q13018 |
| 2666 | 2710 | AKSRREFDEIELAY | | | X | Q13224 |
| 2667 | 2711 | ALDFIRRESSVYDI | | | X | Q13224 |
| 2668 | 2712 | CEENLFSDYISEVE | | | X | Q13224 |
| 2669 | 2713 | DGIAIITTAASDML | | | X | Q13224 |
| 2670 | 2714 | DSKIQNQLKKLQSP | | | X | Q13224 |
| 2671 | 2715 | EEQEDDHLSIVTLE | | | X | Q13224 |
| 2672 | 2716 | ELEEVLLLDMSLDD | | | X | Q13224 |
| 2673 | 2717 | EQEDDHLSIVTLEE | | | X | Q13224 |
| 2674 | 2718 | ESSMFFQFGPSIEQ | | | X | Q13224 |
| 2675 | 2719 | IDILKKISKSVKFT | | | X | Q13224 |
| 2676 | 2720 | ILQLFGDGEMEELE | | | X | Q13224 |
| 2677 | 2721 | IRSDVSDISTHTVT | | | X | Q13224 |
| 2678 | 2722 | KYYVWPRMCPETEE | | | X | Q13224 |
| 2679 | 2723 | LFGDGEMEELEALW | | | X | Q13224 |
| 2680 | 2724 | LIVSAVAVFVFEYF | | | X | Q13224 |
| 2681 | 2725 | NLAAFMIQEEYVDQ | | | X | Q13224 |
| 2682 | 2726 | PTGLISVSYDEWDY | | | X | Q13224 |
| 2683 | 2727 | QASVMLNIMEEYDW | | | X | Q13224 |
| 2684 | 2728 | SAKSRREFDEIELA | | | X | Q13224 |
| 2685 | 2729 | SEHSFIPEPKSSCY | | | X | Q13224 |
| 2686 | 2730 | SFVGWELEEVLLLD | | | X | Q13224 |
| 2687 | 2731 | SGVPAPWEKNLTNV | | | X | Q13224 |
| 2688 | 2732 | SPSAFLEPFSADVW | | | X | Q13224 |
| 2689 | 2733 | SQKSPPSIGIAVIL | | | X | Q13224 |
| 2690 | 2734 | VWPRMCPETEEQED | | | X | Q13224 |
| 2691 | 2735 | WEKNLTNVEWEDRS | | | X | Q13224 |
| 2692 | 2736 | YNNPPCEENLFSDY | | | X | Q13224 |
| 2693 | 2737 | FSPVGYNRCLADGR | | | X | Q13224 |
| 2694 | 2738 | IELAYRRRPPRSPD | | | X | Q13224 |
| 2695 | 2739 | EETPLFLAEPALPK | | | X | Q13255 |
| 2696 | 2740 | ENPNFKRICTGNES | | | X | Q13255 |
| 2697 | 2741 | GLRSLYPPPPPPQH | | | X | Q13255 |
| 2698 | 2742 | KLQSPEVRSFDDYF | | | X | Q13255 |
| 2699 | 2743 | MLDIVKRYNWTYVS | | | X | Q13255 |
| 2700 | 2744 | MPILSYPSIKEVYL | | | X | Q13255 |
| 2701 | 2745 | PGNGLRSLYPPPPP | | | X | Q13255 |
| 2702 | 2746 | STKTLYNVEEEEDA | | | X | Q13255 |
| 2703 | 2747 | TACKENEYVQDEFT | | | X | Q13255 |
| 2704 | 2748 | VQLTLVVTLIIMEP | | | X | Q13255 |
| 2705 | 2749 | NTEEDELEEEEEDL | | | X | Q13255 |
| 2706 | 2750 | REGNTEEDELEEEE | | | X | Q13255 |
| 2707 | 2751 | TLYNVEEEEDAQPI | | | X | Q13255 |
| 2708 | 2752 | CTYYAFKTRNVPAN | | | X | Q13255 |
| 2709 | 2753 | DIPQIAYSATSIDL | | | X | Q13255 |
| 2710 | 2754 | EDELEEEEEDLQAA | | | X | Q13255 |
| 2711 | 2755 | GLSSAMCYSALVTK | | | X | Q13255 |
| 2712 | 2756 | RKLRERLPKARVVV | | | X | Q13255 |
| 2713 | 2757 | FDTAEVYAAGKAEV | | | X | Q13303 |
| 2714 | 2758 | VFANRPDPNTPMEE | | | X | Q13303 |
| 2715 | 2759 | GAIQVLPKLSSSII | | | X | Q13303 |
| 2716 | 2760 | PKLSSSIIHEIDSI | | | X | Q13303 |
| 2717 | 2761 | QVLPKLSSSIIHEI | | | X | Q13303 |
| 2718 | 2762 | SSSIIHEIDSILGN | | | X | Q13303 |
| 2719 | 2763 | VDVVFANRPDPNTP | | | X | Q13303 |
| 2720 | 2764 | ALADACQMEPEEVE | | | X | Q13698 |
| 2721 | 2765 | DACQMEPEEVE | | | X | Q13698 |
| 2722 | 2766 | DFEDTEVRRSNFDN | | | X | Q13698 |
| 2723 | 2767 | DIGFTSVFTVE | | | X | Q13698 |
| 2724 | 2768 | DVILSEIDTFL | | | X | Q13698 |
| 2725 | 2769 | EASSFFIFSPTNKI | | | X | Q13698 |
| 2726 | 2770 | EHFRKFMKRQEEYY | | | X | Q13698 |
| 2727 | 2771 | EIEMEEMESPV | | | X | Q13698 |
| 2728 | 2772 | EKAVPIPEASS | | | X | Q13698 |
| 2729 | 2773 | FAEIEMEEMES | | | X | Q13698 |
| 2730 | 2774 | FRCTDLSKMTEEEC | | | X | Q13698 |
| 2731 | 2775 | GFTSVFTVEIV | | | X | Q13698 |
| 2732 | 2776 | GGLYCLGGGCGNVD | | | X | Q13698 |
| 2733 | 2777 | HFRKFMKRQEE | | | X | Q13698 |
| 2734 | 2778 | IEMEEMESPVFLED | | | X | Q13698 |
| 2735 | 2779 | IILLTIFANCVALA | | | X | Q13698 |
| 2736 | 2780 | KDPYPSADFPGDDE | | | X | Q13698 |
| 2737 | 2781 | KLLDQVIPPIGDDE | | | X | Q13698 |
| 2738 | 2782 | LADACQMEPEE | | | X | Q13698 |
| 2739 | 2783 | LDEFKAIWAEYDPE | | | X | Q13698 |
| 2740 | 2784 | LQFAEIEMEEM | | | X | Q13698 |
| 2741 | 2785 | LRHREWVHSDFHFD | | | X | Q13698 |
| 2742 | 2786 | LRKACISIVEWKPF | | | X | Q13698 |
| 2743 | 2787 | LSPRPRPLAEL | | | X | Q13698 |
| 2744 | 2788 | LYCLGGGCGNV | | | X | Q13698 |
| 2745 | 2789 | MSWITQGEVMDVED | | | X | Q13698 |
| 2746 | 2790 | NCVALAVYLPMPED | | | X | Q13698 |
| 2747 | 2791 | PLQFAEIEMEEMES | | | X | Q13698 |
| 2748 | 2792 | QALADACQMEP | | | X | Q13698 |
| 2749 | 2793 | QVIPPIGDDEV | | | X | Q13698 |
| 2750 | 2794 | RCTDLSKMTEE | | | X | Q13698 |
| 2751 | 2795 | RYDFEDTEVRR | | | X | Q13698 |
| 2752 | 2796 | SADFPGDDEED | | | X | Q13698 |
| 2753 | 2797 | SDYAPGEEYTCGTN | | | X | Q13698 |
| 2754 | 2798 | TFEGWPQLLYKAID | | | X | Q13698 |
| 2755 | 2799 | VATVENEEPSP | | | X | Q13698 |
| 2756 | 2800 | VFSSVHYEREF | | | X | Q13698 |
| 2757 | 2801 | VTFQEQGETEY | | | X | Q13698 |
| 2758 | 2802 | WPQLLYKAIDS | | | X | Q13698 |
| 2759 | 2803 | YAPGEEYTCGT | | | X | Q13698 |
| 2760 | 2804 | YCLGGGCGNVDPDE | | | X | Q13698 |
| 2761 | 2805 | DPESDYAPGEEYTC | | | X | Q13698 |
| 2762 | 2806 | ATVENEEPSPCART | | | X | Q13698 |
| 2763 | 2807 | GKFFRCTDLSKMTE | | | X | Q13698 |
| 2764 | 2808 | VHYEREFPEETETP | | | X | Q13698 |
| 2765 | 2809 | AESLTSAQKEEEEE | | | X | Q13936 |
| 2766 | 2810 | AGNATISTVSS | | | X | Q13936 |
| 2767 | 2811 | AGYPSTVSTVEGHG | | | X | Q13936 |
| 2768 | 2812 | AQDPKFIEVTTQEL | | | X | Q13936 |
| 2769 | 2813 | CKGNYITYKDGEVD | | | X | Q13936 |
| 2770 | 2814 | CKRLVSMNMPL | | | X | Q13936 |
| 2771 | 2815 | CLTLKNPIRRA | | | X | Q13936 |
| 2772 | 2816 | CSDSSKQTEAE | | | X | Q13936 |
| 2773 | 2817 | CVRARGRPSEEELQ | | | X | Q13936 |
| 2774 | 2818 | DMTIEEMESAADNI | | | X | Q13936 |
| 2775 | 2819 | EDEEEPEMPVG | | | X | Q13936 |
| 2776 | 2820 | EDEGMDEEKPR | | | X | Q13936 |
| 2777 | 2821 | ETESVNTENVA | | | X | Q13936 |
| 2778 | 2822 | FDIVFTTIFTIEIA | | | X | Q13936 |
| 2779 | 2823 | GGPSFPGMLVCIYF | | | X | Q13936 |
| 2780 | 2824 | GGSSAARRVRP | | | X | Q13936 |
| 2781 | 2825 | GSAGNATISTV | | | X | Q13936 |
| 2782 | 2826 | GSIVDIAITEVNPA | | | X | Q13936 |
| 2783 | 2827 | GSRGWPPQPVPTLR | | | X | Q13936 |
| 2784 | 2828 | HRISKSKFSRYWRR | | | X | Q13936 |
| 2785 | 2829 | KLMGSAGNATISTV | | | X | Q13936 |
| 2786 | 2830 | LFTVEMILKLIAFK | | | X | Q13936 |
| 2787 | 2831 | LTIFANCVALAIYI | | | X | Q13936 |
| 2788 | 2832 | LTSAQKEEEEE | | | X | Q13936 |
| 2789 | 2833 | MDEEKPRNMSMPTS | | | X | Q13936 |
| 2790 | 2834 | MHKTCYNQEGIADV | | | X | Q13936 |
| 2791 | 2835 | MVPSQAGAPGRQFH | | | X | Q13936 |
| 2792 | 2836 | NYITYKDGEVD | | | X | Q13936 |
| 2793 | 2837 | PEDDSNATNSN | | | X | Q13936 |
| 2794 | 2838 | PETTGEEDEEE | | | X | Q13936 |
| 2795 | 2839 | PHHLDEFKRIWAEY | | | X | Q13936 |
| 2796 | 2840 | PLSPAIRVQEVAWK | | | X | Q13936 |
| 2797 | 2841 | PVGPRPRPLSE | | | X | Q13936 |
| 2798 | 2842 | QKEEEEEKERK | | | X | Q13936 |
| 2799 | 2843 | QRKRQQYGKPK | | | X | Q13936 |
| 2800 | 2844 | RNMSMPTSETESVN | | | X | Q13936 |
| 2801 | 2845 | SAQKEEEEEKE | | | X | Q13936 |
| 2802 | 2846 | SITADGESPPA | | | X | Q13936 |
| 2803 | 2847 | SKQTEAECKGN | | | X | Q13936 |
| 2804 | 2848 | SRGWPPQPVPT | | | X | Q13936 |
| 2805 | 2849 | STEMLSYQDDENRQ | | | X | Q13936 |
| 2806 | 2850 | STGSNANINNA | | | X | Q13936 |
| 2807 | 2851 | STQRKRQQYGK | | | X | Q13936 |
| 2808 | 2852 | TADGESPPATK | | | X | Q13936 |
| 2809 | 2853 | TFDNFPQSLLT | | | X | Q13936 |
| 2810 | 2854 | TFTPSSYSSTGSNA | | | X | Q13936 |
| 2811 | 2855 | TGEEDEEEPEMPVG | | | X | Q13936 |
| 2812 | 2856 | TIEIALKILGNADY | | | X | Q13936 |
| 2813 | 2857 | TIFTNLILFFILLS | | | X | Q13936 |
| 2814 | 2858 | TTGEEDEEEPE | | | X | Q13936 |
| 2815 | 2859 | VEYLFLIIFTVEAF | | | X | Q13936 |
| 2816 | 2860 | VGRDWPWIYFV | | | X | Q13936 |
| 2817 | 2861 | VNSTYFEYLMFVLI | | | X | Q13936 |
| 2818 | 2862 | VSLMVPSQAGAPGR | | | X | Q13936 |
| 2819 | 2863 | WDGPKHGITNFDNF | | | X | Q13936 |
| 2820 | 2864 | YFEYLMFVLIL | | | X | Q13936 |
| 2821 | 2865 | YFSDPWNVFDF | | | X | Q13936 |
| 2822 | 2866 | YKVWYVVNSTYFEY | | | X | Q13936 |
| 2823 | 2867 | YLFLIIFTVEA | | | X | Q13936 |
| 2824 | 2868 | YPNPETTGEEDEEE | | | X | Q13936 |
| 2825 | 2869 | YTCSDSSKQTE | | | X | Q13936 |
| 2826 | 2870 | TESVNTENVAGGDI | | | X | Q13936 |
| 2827 | 2871 | TSETESVNTENVAG | | | X | Q13936 |
| 2828 | 2872 | DDSNATNSNLERVE | | | X | Q13936 |
| 2829 | 2873 | APGEPCPLAQEEVI | | | X | Q14003 |
| 2830 | 2874 | ASPIPGAPPENITN | | | X | Q14003 |
| 2831 | 2875 | CKPDPPPPPPPHPH | | | X | Q14003 |
| 2832 | 2876 | DGGLDDEAGAGGGG | | | X | Q14003 |
| 2833 | 2877 | DVCGPLFEEELGFW | | | X | Q14003 |
| 2834 | 2878 | LCFQDAGGGAGGPP | | | X | Q14003 |
| 2835 | 2879 | LDDEAGAGGGGLDG | | | X | Q14003 |
| 2836 | 2880 | LKRLCFQDAGGGAG | | | X | Q14003 |
| 2837 | 2881 | PDDILGSNHTYFKN | | | X | Q14003 |
| 2838 | 2882 | PPPQPPESPPPPPL | | | X | Q14003 |
| 2839 | 2883 | RGRQGASKQQPAPP | | | X | Q14003 |
| 2840 | 2884 | SNHTYFKNIPIGFW | | | X | Q14003 |
| 2841 | 2885 | APPENITNVEVETE | | | X | Q14003 |
| 2842 | 2886 | DAEEALDSFEAPDP | | | X | Q14003 |
| 2843 | 2887 | RFDYDPGADEFFFD | | | X | Q14003 |
| 2844 | 2888 | YYAERIGADPDDIL | | | X | Q14003 |
| 2845 | 2889 | FDAPFRPADTHNEV | | | X | Q14416 |
| 2846 | 2890 | GPAKKVLTLEGDLV | | | X | Q14416 |
| 2847 | 2891 | DSLLEVCDDYSLDD | | | X | Q14721 |
| 2848 | 2892 | DYWGIDEIYLESCC | | | X | Q14721 |
| 2849 | 2893 | EAETLREREGEEFD | | | X | Q14721 |
| 2850 | 2894 | ELGLLILFLAMGIM | | | X | Q14721 |
| 2851 | 2895 | EMCALSFSQELDYW | | | X | Q14721 |
| 2852 | 2896 | EPMEIVRSKACSRR | | | X | Q14721 |
| 2853 | 2897 | KGPSGQEKCKLENH | | | X | Q14721 |
| 2854 | 2898 | MNMKDAFARSIEMM | | | X | Q14721 |
| 2855 | 2899 | RDCNTHDSLLEVCD | | | X | Q14721 |
| 2856 | 2900 | RLNVGGLAHEVLWR | | | X | Q14721 |
| 2857 | 2901 | SAAQSKPKEELEME | | | X | Q14721 |
| 2858 | 2902 | SFWWATITMTTVGY | | | X | Q14721 |
| 2859 | 2903 | SGQEKCKLENHISP | | | X | Q14721 |
| 2860 | 2904 | TSSLPPEPMEIVRS | | | X | Q14721 |
| 2861 | 2905 | VEAVCIAWFTMEYL | | | X | Q14721 |
| 2862 | 2906 | YSLDDNEYFFDRHP | | | X | Q14721 |
| 2863 | 2907 | CDDYSLDDNEYFFD | | | X | Q14721 |
| 2864 | 2908 | LEVCDDYSLDDNEY | | | X | Q14721 |
| 2865 | 2909 | DVVFANRPDSNTPM | | | X | Q14722 |
| 2866 | 2910 | KMTSHVVNEIDNIL | | | X | Q14722 |
| 2867 | 2911 | VLPKMTSHVVNEID | | | X | Q14722 |
| 2868 | 2912 | FANRPDSNTPMEEI | | | X | Q14722 |
| 2869 | 2913 | PCCWTCEPCDGYQY | | | X | Q14831 |
| 2870 | 2914 | PELNVQKRKRSFKA | | | X | Q14831 |
| 2871 | 2915 | CWICIPCEPYEYLA | | | X | Q14832 |
| 2872 | 2916 | FGDGMGRYNVFNFQ | | | X | Q14832 |
| 2873 | 2917 | AALVRRAPQPPGRP | | | X | Q14957 |
| 2874 | 2918 | APVFVAYCSREEAE | | | X | Q14957 |
| 2875 | 2919 | CLTVVAITVFMFEY | | | X | Q14957 |
| 2876 | 2920 | DMVTTAGVSSSLDR | | | X | Q14957 |
| 2877 | 2921 | FMIQEQYIDTVSGL | | | X | Q14957 |
| 2878 | 2922 | IQPLTVGVNTTNPS | | | X | Q14957 |
| 2879 | 2923 | KLRHSVPNSSQLDF | | | X | Q14957 |
| 2880 | 2924 | LTVGVNTTNPSSLL | | | X | Q14957 |
| 2881 | 2925 | NEKNEVMSSKLDID | | | X | Q14957 |
| 2882 | 2926 | PAPAGDCRVHPGPV | | | X | Q14957 |
| 2883 | 2927 | PEPSPTGWGPPDGG | | | X | Q14957 |
| 2884 | 2928 | QLQVLFKVLEEYDW | | | X | Q14957 |
| 2885 | 2929 | RLLDVVTLELGPGG | | | X | Q14957 |
| 2886 | 2930 | RPFLPLFPELEDLP | | | X | Q14957 |
| 2887 | 2931 | RSGRPFLPLFPELE | | | X | Q14957 |
| 2888 | 2932 | SQTHVPILSISGGS | | | X | Q14957 |
| 2889 | 2933 | SVVTESWRLSLRQK | | | X | Q14957 |
| 2890 | 2934 | VKFNQRSVEDALTS | | | X | Q14957 |
| 2891 | 2935 | ATFPVGLISVVTES | | | X | Q14957 |
| 2892 | 2936 | FLGDGETQKLETVW | | | X | Q14957 |
| 2893 | 2937 | QPLTVGVNTTNPSS | | | X | Q14957 |
| 2894 | 2938 | VWLSGICQNEKNEV | | | X | Q14957 |
| 2895 | 2939 | AEEREVVVEEEDRW | | | X | Q15822 |
| 2896 | 2940 | AKIDLEQMEQTVDL | | | X | Q15822 |
| 2897 | 2941 | ALLQEGELLLS | | | X | Q15822 |
| 2898 | 2942 | ASGPKAEALLQEGE | | | X | Q15822 |
| 2899 | 2943 | CKMKFGSWTYD | | | X | Q15822 |
| 2900 | 2944 | FRGYNRWARPV | | | X | Q15822 |
| 2901 | 2945 | IDLEQMEQTVD | | | X | Q15822 |
| 2902 | 2946 | LESNVDAEEREVVV | | | X | Q15822 |
| 2903 | 2947 | LMNRPPPPVEL | | | X | Q15822 |
| 2904 | 2948 | NVDAEEREVVV | | | X | Q15822 |
| 2905 | 2949 | NVDAEEREVVVEEE | | | X | Q15822 |
| 2906 | 2950 | REVVVEEEDRW | | | X | Q15822 |
| 2907 | 2951 | RWNPTDFGNIT | | | X | Q15822 |
| 2908 | 2952 | WLLMNRPPPPVELC | | | X | Q15822 |
| 2909 | 2953 | AEALLQE | | | X | Q15822 |
| 2910 | 2954 | ALLQEGE | | | X | Q15822 |
| 2911 | 2955 | ALLQEGELLLSPH | | | X | Q15822 |
| 2912 | 2956 | GASGPKAEALLQE | | | X | Q15822 |
| 2913 | 2957 | VPPAIYKSSCSID | | | X | Q15822 |
| 2914 | 2958 | CEEIYTDITYS | | | X | Q15825 |
| 2915 | 2959 | CFHCHKSNELA | | | X | Q15825 |
| 2916 | 2960 | DGIETLRVPAD | | | X | Q15825 |
| 2917 | 2961 | DLLIIGSKVDM | | | X | Q15825 |
| 2918 | 2962 | EIDLLIIGSKV | | | X | Q15825 |
| 2919 | 2963 | ITQLANVDEVN | | | X | Q15825 |
| 2920 | 2964 | ITQLANVDEVNQIM | | | X | Q15825 |
| 2921 | 2965 | LANVDEVNQIMETN | | | X | Q15825 |
| 2922 | 2966 | LRWDPMEYDGI | | | X | Q15825 |
| 2923 | 2967 | NLWLRHIWNDY | | | X | Q15825 |
| 2924 | 2968 | PAIFKSSCPMDITF | | | X | Q15825 |
| 2925 | 2969 | SEHSPEVEDVI | | | X | Q15825 |
| 2926 | 2970 | TLSIVVTVFVL | | | X | Q15825 |
| 2927 | 2971 | VHFEVAITQLANVD | | | X | Q15825 |
| 2928 | 2972 | WTPPAIFKSSCPMD | | | X | Q15825 |
| 2929 | 2973 | YDKAEIDLLII | | | X | Q15825 |
| 2930 | 2974 | YKLRWDPMEYD | | | X | Q15825 |
| 2931 | 2975 | DMNDFWENSEWEI | | | X | Q15825 |
| 2932 | 2976 | ENVSDPV | | | X | Q15825 |
| 2933 | 2977 | EVAITQLANVDEV | | | X | Q15825 |
| 2934 | 2978 | LANVDEV | | | X | Q15825 |
| 2935 | 2979 | NLIIPCLFISFLT | | | X | Q15825 |
| 2936 | 2980 | QFIRPVENVSDPV | | | X | Q15825 |
| 2937 | 2981 | VAITQLANVDEVN | | | X | Q15825 |
| 2938 | 2982 | VQFIAEN | | | X | Q15825 |
| 2939 | 2983 | AAVATSLGRSN | | | X | Q15878 |
| 2940 | 2984 | ACFMNNSGILE | | | X | Q15878 |
| 2941 | 2985 | ADDGQFQERQSLEP | | | X | Q15878 |
| 2942 | 2986 | AEIREDEEEVE | | | X | Q15878 |
| 2943 | 2987 | AKEPTIQEERAQDL | | | X | Q15878 |
| 2944 | 2988 | AKEVSPMSAPN | | | X | Q15878 |
| 2945 | 2989 | ALEQHLPEDDKTPM | | | X | Q15878 |
| 2946 | 2990 | ALEVLRRATIK | | | X | Q15878 |
| 2947 | 2991 | APNMPSIERDR | | | X | Q15878 |
| 2948 | 2992 | CEPDTTAPSGQ | | | X | Q15878 |
| 2949 | 2993 | DEFVRVWAEYD | | | X | Q15878 |
| 2950 | 2994 | DSHASDCGEEE | | | X | Q15878 |
| 2951 | 2995 | EDEEEVEKKKQ | | | X | Q15878 |
| 2952 | 2996 | EPYLALHEDSH | | | X | Q15878 |
| 2953 | 2997 | EQGDKMMEECS | | | X | Q15878 |
| 2954 | 2998 | FMNNSGILEGF | | | X | Q15878 |
| 2955 | 2999 | FRDLWNILDFV | | | X | Q15878 |
| 2956 | 3000 | FRPGTSFGISV | | | X | Q15878 |
| 2957 | 3001 | GDKMMEECSLE | | | X | Q15878 |
| 2958 | 3002 | GDSDQSRNRQGTPV | | | X | Q15878 |
| 2959 | 3003 | GQFQERQSLEP | | | X | Q15878 |
| 2960 | 3004 | GWPQVLQHSVDVTE | | | X | Q15878 |
| 2961 | 3005 | HGAKEPTIQEE | | | X | Q15878 |
| 2962 | 3006 | HHLDEFVRVWAEYD | | | X | Q15878 |
| 2963 | 3007 | HNQPQWLTHLL | | | X | Q15878 |
| 2964 | 3008 | IAASSIALAAEDPV | | | X | Q15878 |
| 2965 | 3009 | KDEQEEEEAFN | | | X | Q15878 |
| 2966 | 3010 | KEAEIREDEEE | | | X | Q15878 |
| 2967 | 3011 | KEAEIREDEEEVEK | | | X | Q15878 |
| 2968 | 3012 | KRLVLMNMPVA | | | X | Q15878 |
| 2969 | 3013 | KVAYKRLVLMNMPV | | | X | Q15878 |
| 2970 | 3014 | KVKKQRQQLEE | | | X | Q15878 |
| 2971 | 3015 | LGATWNWLYFI | | | X | Q15878 |
| 2972 | 3016 | LGLALEKFEEE | | | X | Q15878 |
| 2973 | 3017 | LPYLQQDPVSG | | | X | Q15878 |
| 2974 | 3018 | LVLMNMPVAED | | | X | Q15878 |
| 2975 | 3019 | MSFLKLFRAAR | | | X | Q15878 |
| 2976 | 3020 | PNGHYRRRRRGGPG | | | X | Q15878 |
| 2977 | 3021 | PPLRHSWQMPN | | | X | Q15878 |
| 2978 | 3022 | PSLYRRPRAIE | | | X | Q15878 |
| 2979 | 3023 | QPQWLTHLLYY | | | X | Q15878 |
| 2980 | 3024 | QSRSPSEGRSQ | | | X | Q15878 |
| 2981 | 3025 | QWLTHLLYYAE | | | X | Q15878 |
| 2982 | 3026 | RSPSEGRSQTP | | | X | Q15878 |
| 2983 | 3027 | SPMSAPNMPSI | | | X | Q15878 |
| 2984 | 3028 | SPPLGLGKRCP | | | X | Q15878 |
| 2985 | 3029 | TTESTSVTVAIPDV | | | X | Q15878 |
| 2986 | 3030 | VHHNQPQWLTH | | | X | Q15878 |
| 2987 | 3031 | VLTEQEPEGSS | | | X | Q15878 |
| 2988 | 3032 | VQPSNHGIYLP | | | X | Q15878 |
| 2989 | 3033 | WHFVVSPSFEY | | | X | Q15878 |
| 2990 | 3034 | YKRLVLMNMPVAED | | | X | Q15878 |
| 2991 | 3035 | EQKNAPMFQRMEPS | | | X | Q15878 |
| 2992 | 3036 | AIPDVDPLVDSTVV | | | X | Q15878 |
| 2993 | 3037 | HRQSQRRSRHRRVR | | | X | Q15878 |
| 2994 | 3038 | IFDFITVIGSITEI | | | X | Q15878 |
| 2995 | 3039 | LAEENKNAGTSALE | | | X | Q15878 |
| 2996 | 3040 | QALESNNACLTESS | | | X | Q15878 |
| 2997 | 3041 | RARHRQSQRRSRHR | | | X | Q15878 |
| 2998 | 3042 | TEQEPEGSSEQALL | | | X | Q15878 |
| 2999 | 3043 | ADCPMRLVNFPMDG | | | X | Q16445 |
| 3000 | 3044 | AGFNLVYWVVYLSK | | | X | Q16445 |
| 3001 | 3045 | IKSNTGEYVIMTVY | | | X | Q16445 |
| 3002 | 3046 | WLCIILWLENALGK | | | X | Q16445 |
| 3003 | 3047 | RAPILQSTPVTPPP | | | X | Q16445 |
| 3004 | 3048 | IFFEALNYETIEQK | | | X | Q16515 |
| 3005 | 3049 | TIEQKKAYEVAALL | | | X | Q16515 |
| 3006 | 3050 | TISHTVNVPLQTTL | | | X | Q16515 |
| 3007 | 3051 | DSTTYAHFLFNAFD | | | X | Q6PIL6 |
| 3008 | 3052 | YAQNSTKRSIKERL | | | X | Q6PIL6 |
| 3009 | 3053 | ISSKVPKAEYIPTI | | | X | Q6X4W1 |
| 3010 | 3054 | SLVSNGCYEGSLSE | | | X | Q6X4W1 |
| 3011 | 3055 | AGYWNEYERFVP | | | X | P42263 |
| 3012 | 3056 | FSPYEWHLEDNNEE | | | X | P42263 |
| 3013 | 3057 | YEWHLEDNNEEPRD | | | X | P42263 |
| 3014 | 3058 | NYNSVDLSEVEWED | | | X | Q7Z3S7 |
| 3015 | 3059 | AHGLLDPYNAF | | | X | Q8IZS8 |
| 3016 | 3060 | DQGPVLMTTVAMPV | | | X | Q8IZS8 |
| 3017 | 3061 | DTLGDDDFFNIIAY | | | X | Q8IZS8 |
| 3018 | 3062 | DVLRNAMVNRK | | | X | Q8IZS8 |
| 3019 | 3063 | EFDADLQYEYF | | | X | Q8IZS8 |
| 3020 | 3064 | EPDENGVIAFDCRN | | | X | Q8IZS8 |
| 3021 | 3065 | FFNIIAYNEEL | | | X | Q8IZS8 |
| 3022 | 3066 | FRGNVTIEEGL | | | X | Q8IZS8 |
| 3023 | 3067 | GDDDFFNIIAYNEE | | | X | Q8IZS8 |
| 3024 | 3068 | GSFVYSIPFSTGPV | | | X | Q8IZS8 |
| 3025 | 3069 | IMLITDGAVDT | | | X | Q8IZS8 |
| 3026 | 3070 | KEYEKDVAIEE | | | X | Q8IZS8 |
| 3027 | 3071 | KEYEKDVAIEEIDG | | | X | Q8IZS8 |
| 3028 | 3072 | LALNKSENSDK | | | X | Q8IZS8 |
| 3029 | 3073 | LPQAQKLTDDQGPV | | | X | Q8IZS8 |
| 3030 | 3074 | LRNAMVNRKTG | | | X | Q8IZS8 |
| 3031 | 3075 | LVDVSGSMKGLRLT | | | X | Q8IZS8 |
| 3032 | 3076 | NERDKDGNFLE | | | X | Q8IZS8 |
| 3033 | 3077 | NIIAYNEELHYVEP | | | X | Q8IZS8 |
| 3034 | 3078 | NNLPVNISLSD | | | X | Q8IZS8 |
| 3035 | 3079 | NYSSVDLSEVE | | | X | Q8IZS8 |
| 3036 | 3080 | PVLMTTVAMPV | | | X | Q8IZS8 |
| 3037 | 3081 | QLVKKLAKNMEEMF | | | X | Q8IZS8 |
| 3038 | 3082 | QYPGIKWEPDE | | | X | Q8IZS8 |
| 3039 | 3083 | SILDTLGDDDFFNI | | | X | Q8IZS8 |
| 3040 | 3084 | SQAIMLITDGAVDT | | | X | Q8IZS8 |
| 3041 | 3085 | THPELRLLYEE | | | X | Q8IZS8 |
| 3042 | 3086 | TSLALNKSENS | | | X | Q8IZS8 |
| 3043 | 3087 | TVSSILDTLGDDDF | | | X | Q8IZS8 |
| 3044 | 3088 | VIDQEHDVVWTEAY | | | X | Q8IZS8 |
| 3045 | 3089 | VSEDYTQTGDF | | | X | Q8IZS8 |
| 3046 | 3090 | YWTSLALNKSENSD | | | X | Q8IZS8 |
| 3047 | 3091 | EAYWTSLALNKSEN | | | X | Q8IZS8 |
| 3048 | 3092 | LALNKSENSDKGVE | | | X | Q8IZS8 |
| 3049 | 3093 | WTSLALNKSENSDK | | | X | Q8IZS8 |
| 3050 | 3094 | AECYLQLHNFPMDE | | | X | Q8N1C3 |
| 3051 | 3095 | GNCVDKADDEDDED | | | X | Q8N1C3 |
| 3052 | 3096 | LHLGNCVDKADDED | | | X | Q8N1C3 |
| 3053 | 3097 | TISGDYVIMTIFFD | | | X | Q8N1C3 |
| 3054 | 3098 | YLQLHNFPMDEHSC | | | X | Q8N1C3 |
| 3055 | 3099 | VDKADDEDDEDLTV | | | X | Q8N1C3 |
| 3056 | 3100 | CASTLPDWRNAAAD | | | X | Q8TAE7 |
| 3057 | 3101 | LEVCDDYDRERNEY | | | X | Q8TAE7 |
| 3058 | 3102 | RDVLEVCDDYDRER | | | X | Q8TAE7 |
| 3059 | 3103 | RMRRTFEEPTSSLA | | | X | Q8TAE7 |
| 3060 | 3104 | RSERDVLEVCDDYD | | | X | Q8TAE7 |
| 3061 | 3105 | CDDYDRERNEYFFD | | | X | Q8TAE7 |
| 3062 | 3106 | SARYSRSLSTEFLN | | | X | Q8TAE7 |
| 3063 | 3107 | IFEITTQFGVMPPE | | | X | Q8TCU5 |
| 3064 | 3108 | IPLPPRRRELPALR | | | X | Q8TCU5 |
| 3065 | 3109 | LDAFIMDKALLDYE | | | X | Q8TCU5 |
| 3066 | 3110 | NNFFIWNLQHDPMG | | | X | Q8TCU5 |
| 3067 | 3111 | PFVFTREVDDEGLC | | | X | Q8TCU5 |
| 3068 | 3112 | QELQLAVSRKTELE | | | X | Q8TCU5 |
| 3069 | 3113 | QLGIRIHQDIPLPP | | | X | Q8TCU5 |
| 3070 | 3114 | RSQVIDFTSPFFST | | | X | Q8TCU5 |
| 3071 | 3115 | RWVLGDSQNVEELR | | | X | Q8TCU5 |
| 3072 | 3116 | TMNCMEVETTNLTS | | | X | Q8TCU5 |
| 3073 | 3117 | TNGKADSLNVSRNS | | | X | Q8TCU5 |
| 3074 | 3118 | ADSLNVSRNSVMQE | | | X | Q8TCU5 |
| 3075 | 3119 | NGKADSLNVSRNSV | | | X | Q8TCU5 |
| 3076 | 3120 | DIDPEIETECFFVE | | | X | Q8TDD5 |
| 3077 | 3121 | ECLFSLINGDDMFA | | | X | Q8TDD5 |
| 3078 | 3122 | CDDYDEDSQEFFFD | | | X | Q8TDN1 |
| 3079 | 3123 | EEIVQLCDDYDEDS | | | X | Q8TDN1 |
| 3080 | 3124 | DLRRFARSALNLVD | | | X | Q8TDN2 |
| 3081 | 3125 | EEDEDGEEEDQWKD | | | X | Q8TDN2 |
| 3082 | 3126 | KDDLAEEDQQAGEV | | | X | Q8TDN2 |
| 3083 | 3127 | RRSWSYRPWNTTEN | | | X | Q8TDN2 |
| 3084 | 3128 | AAGGAGGGGGGGGG | | | X | Q8WXS5 |
| 3085 | 3129 | AGLAGAGGGGG | | | X | Q8WXS5 |
| 3086 | 3130 | DTDYDHDSAEY | | | X | Q8WXS5 |
| 3087 | 3131 | FGGAAGGAGGGGGG | | | X | Q8WXS5 |
| 3088 | 3132 | GAGGGGGGAVG | | | X | Q8WXS5 |
| 3089 | 3133 | GAGGGGGGGGGAGA | | | X | Q8WXS5 |
| 3090 | 3134 | GGGGGAGAERD | | | X | Q8WXS5 |
| 3091 | 3135 | GGGGGGGGAGAERD | | | X | Q8WXS5 |
| 3092 | 3136 | HFPEDTDYDHD | | | X | Q8WXS5 |
| 3093 | 3137 | INHFPEDTDYD | | | X | Q8WXS5 |
| 3094 | 3138 | LYTRALICNTTNLT | | | X | Q8WXS5 |
| 3095 | 3139 | NHFPEDTDYDHDSA | | | X | Q8WXS5 |
| 3096 | 3140 | PSYRFRYRRRS | | | X | Q8WXS5 |
| 3097 | 3141 | RALICNTTNLT | | | X | Q8WXS5 |
| 3098 | 3142 | RGVCVKINHFP | | | X | Q8WXS5 |
| 3099 | 3143 | RLPSYRFRYRR | | | X | Q8WXS5 |
| 3100 | 3144 | SDLLKAGGGAG | | | X | Q8WXS5 |
| 3101 | 3145 | VTVTVTGPPAP | | | X | Q8WXS5 |
| 3102 | 3146 | YRFRYRRRSRS | | | X | Q8WXS5 |
| 3103 | 3147 | YTRALICNTTN | | | X | Q8WXS5 |
| 3104 | 3148 | AILRLPSYRFRYRR | | | X | Q8WXS5 |
| 3105 | 3149 | EPGPKRDEEKKNHY | | | X | Q8WXS5 |
| 3106 | 3150 | FRYRRRSRSSSRSS | | | X | Q8WXS5 |
| 3107 | 3151 | HFPEDTDYDHDSAE | | | X | Q8WXS5 |
| 3108 | 3152 | KINHFPEDTDYDHD | | | X | Q8WXS5 |
| 3109 | 3153 | SYRFRYRRRSRSSS | | | X | Q8WXS5 |
| 3110 | 3154 | CNTHESLLEVCDDY | | | X | Q92953 |
| 3111 | 3155 | DDEDFLELPGAREE | | | X | Q92953 |
| 3112 | 3156 | DGTLEYAPVDITVN | | | X | Q92953 |
| 3113 | 3157 | ERPSAYEEEIEMEE | | | X | Q92953 |
| 3114 | 3158 | HQKKEQMNEELRRE | | | X | Q92953 |
| 3115 | 3159 | LFPFSSRERRSFTE | | | X | Q92953 |
| 3116 | 3160 | NFKENRGSAPQTPP | | | X | Q92953 |
| 3117 | 3161 | RERRSFTEIDTGDD | | | X | Q92953 |
| 3118 | 3162 | SAYEEEIEMEEVVC | | | X | Q92953 |
| 3119 | 3163 | TEIDTGDDEDFLEL | | | X | Q92953 |
| 3120 | 3164 | CDDYNLNENEYFFD | | | X | Q92953 |
| 3121 | 3165 | SFTSCATDFTETER | | | X | Q92953 |
| 3122 | 3166 | SIDSFTSCATDFTE | | | X | Q92953 |
| 3123 | 3167 | ASEEQARRLCDDYD | | | X | Q96KK3 |
| 3124 | 3168 | AVRNSNHQEFEDLL | | | X | Q96KK3 |
| 3125 | 3169 | FEDLLSSIDGVSEA | | | X | Q96KK3 |
| 3126 | 3170 | RRLCDDYDEAAREF | | | X | Q96KK3 |
| 3127 | 3171 | ARYGAARCGRLRRR | | | X | Q96KK3 |
| 3128 | 3172 | ASLETSRETSQEGQ | | | X | Q96KK3 |
| 3129 | 3173 | IDGVSEASLETSRE | | | X | Q96KK3 |
| 3130 | 3174 | DEEEEEEGEEEEAV | | | X | Q96L42 |
| 3131 | 3175 | DLSPRIVDGIEDGN | | | X | Q96L42 |
| 3132 | 3176 | EEEEGEEEEAVSLS | | | X | Q96L42 |
| 3133 | 3177 | HQPCLHLQTGGAAY | | | X | Q96L42 |
| 3134 | 3178 | IEDGNSSEESQTFD | | | X | Q96L42 |
| 3135 | 3179 | IVEDEEEEEEGEEE | | | X | Q96L42 |
| 3136 | 3180 | LEYFQTTWSVNNGI | | | X | Q96L42 |
| 3137 | 3181 | LPSIVEDEEEEEEG | | | X | Q96L42 |
| 3138 | 3182 | MQKSCSCKFLFGVE | | | X | Q96L42 |
| 3139 | 3183 | NKRLPSIVEDEEEE | | | X | Q96L42 |
| 3140 | 3184 | NNTLGGPSIRSAYI | | | X | Q96L42 |
| 3141 | 3185 | PEYAHKFVEDIQHD | | | X | Q96L42 |
| 3142 | 3186 | PRIVDGIEDGNSSE | | | X | Q96L42 |
| 3143 | 3187 | RLLRLLQKLDRYSQ | | | X | Q96L42 |
| 3144 | 3188 | SCSCKFLFGVETNE | | | X | Q96L42 |
| 3145 | 3189 | SSLTSVGFGNVSAN | | | X | Q96L42 |
| 3146 | 3190 | VDGIEDGNSSEESQ | | | X | Q96L42 |
| 3147 | 3191 | VSRSNSPKTKQEID | | | X | Q96L42 |
| 3148 | 3192 | EEEEEEGEEEEAVS | | | X | Q96L42 |
| 3149 | 3193 | GSWNQEGMASASTK | | | X | Q96L42 |
| 3150 | 3194 | KIFSICTMLIGALM | | | X | Q96L42 |
| 3151 | 3195 | NLPGSWNQEGMASA | | | X | Q96L42 |
| 3152 | 3196 | PSIVEDEEEEEEGE | | | X | Q96L42 |
| 3153 | 3197 | SLTSVGFGNVSANT | | | X | Q96L42 |
| 3154 | 3198 | SVGFGNVSANTDAE | | | X | Q96L42 |
| 3155 | 3199 | VEDEEEEEEGEEEE | | | X | Q96L42 |
| 3156 | 3200 | ADVCGPLFEEELAF | | | X | Q96PR1 |
| 3157 | 3201 | APPLSPGPGGCFEG | | | X | Q96PR1 |
| 3158 | 3202 | DLAAKRLGIEDAAG | | | X | Q96PR1 |
| 3159 | 3203 | PLFEEELAFWGIDE | | | X | Q96PR1 |
| 3160 | 3204 | PSPPPLSPPPRAPP | | | X | Q96PR1 |
| 3161 | 3205 | QYEIETDPALTYVE | | | X | Q96PR1 |
| 3162 | 3206 | TPDLIGGDPGDDED | | | X | Q96PR1 |
| 3163 | 3207 | LRFETRARTLGRFP | | | X | Q96RP8 |
| 3164 | 3208 | YWQEFEDTCVYECL | | | X | Q99928 |
| 3165 | 3209 | DSTDASSIEDNEDI | | | X | Q9BQ31 |
| 3166 | 3210 | SEFQNEDGEVDDPV | | | X | Q9BQ31 |
| 3167 | 3211 | CHEDWKRLARV | | | X | Q9GZZ6 |
| 3168 | 3212 | HYCGPSVRPVP | | | X | Q9GZZ6 |
| 3169 | 3213 | ILIMNLHYCGPSVR | | | X | Q9GZZ6 |
| 3170 | 3214 | PELSPSPQSPE | | | X | Q9GZZ6 |
| 3171 | 3215 | PVPAWARALLL | | | X | Q9GZZ6 |
| 3172 | 3216 | QEALLHHVATIANT | | | X | Q9GZZ6 |
| 3173 | 3217 | RGAAASLADFV | | | X | Q9GZZ6 |
| 3174 | 3218 | RGEPCGQSRPPELS | | | X | Q9GZZ6 |
| 3175 | 3219 | TLYLWIRQEWT | | | X | Q9GZZ6 |
| 3176 | 3220 | ILIMNLHYCGPSV | | | X | Q9GZZ6 |
| 3177 | 3221 | MDERNQV | | | X | Q9GZZ6 |
| 3178 | 3222 | PPELSPSPQSPEG | | | X | Q9GZZ6 |
| 3179 | 3223 | QSRPPELSPSPQS | | | X | Q9GZZ6 |
| 3180 | 3224 | RPPELSPSPQSPE | | | X | Q9GZZ6 |
| 3181 | 3225 | RPVPAWARALLLG | | | X | Q9GZZ6 |
| 3182 | 3226 | RRRAAAY | | | X | Q9GZZ6 |
| 3183 | 3227 | SPSPQSP | | | X | Q9GZZ6 |
| 3184 | 3228 | SRPPELSPSPQSP | | | X | Q9GZZ6 |
| 3185 | 3229 | TYGCCSEPYPDVT | | | X | Q9GZZ6 |
| 3186 | 3230 | VRPRGAA | | | X | Q9GZZ6 |
| 3187 | 3231 | VRPVPAWARALLL | | | X | Q9GZZ6 |
| 3188 | 3232 | WARALLL | | | X | Q9GZZ6 |
| 3189 | 3233 | YLWIRQE | | | X | Q9GZZ6 |
| 3190 | 3234 | RVSSDLSRILQLLQ | | | X | Q9H252 |
| 3191 | 3235 | SNDLALVPIASETT | | | X | Q9H252 |
| 3192 | 3236 | VFTPYSAAFLLSDQ | | | X | Q9H252 |
| 3193 | 3237 | AVSRLAQALLGAEE | | | X | Q9H252 |
| 3194 | 3238 | FTPYSAAFLLSDQD | | | X | Q9H252 |
| 3195 | 3239 | KHRSSSTTEIEIIA | | | X | Q9H252 |
| 3196 | 3240 | VAILGKNDIFGEPV | | | X | Q9H252 |
| 3197 | 3241 | QSHPETLFKSIPQS | | | X | Q9H3M0 |
| 3198 | 3242 | VLAILPFYVSLTLT | | | X | Q9H3M0 |
| 3199 | 3243 | IRIMKFHVAKRKFK | | | X | Q9NR82 |
| 3200 | 3244 | PFECEQTSDYQSPV | | | X | Q9NR82 |
| 3201 | 3245 | AFRGASKGCLRALA | | | X | Q9NS40 |
| 3202 | 3246 | DLHKIQREDLLEVL | | | X | Q9NS40 |
| 3203 | 3247 | EDPDVVVIDSSKHS | | | X | Q9NS40 |
| 3204 | 3248 | FNHIKSSLLGSTSD | | | X | Q9NS40 |
| 3205 | 3249 | GIGKASGLDFEETV | | | X | Q9NS40 |
| 3206 | 3250 | GLDFEETVPTSGRM | | | X | Q9NS40 |
| 3207 | 3251 | GLHRHVSDPGLPGK | | | X | Q9NS40 |
| 3208 | 3252 | GTIIRKFEGQNKKF | | | X | Q9NS40 |
| 3209 | 3253 | IIAPKVKDRTHNVT | | | X | Q9NS40 |
| 3210 | 3254 | KASGLDFEETVPTS | | | X | Q9NS40 |
| 3211 | 3255 | LDRYSEYGAAVLML | | | X | Q9NS40 |
| 3212 | 3256 | LQKQTTVVPPAYSM | | | X | Q9NS40 |
| 3213 | 3257 | LQLLQKQTTVVPPA | | | X | Q9NS40 |
| 3214 | 3258 | NFRTTYVNQNEEVV | | | X | Q9NS40 |
| 3215 | 3259 | QTTVVPPAYSMVTA | | | X | Q9NS40 |
| 3216 | 3260 | REDLLEVLDMYPEF | | | X | Q9NS40 |
| 3217 | 3261 | RRASSVHDIEGFGV | | | X | Q9NS40 |
| 3218 | 3262 | SSSFISSIDDEQKP | | | X | Q9NS40 |
| 3219 | 3263 | VNISGPLDHSSPKR | | | X | Q9NS40 |
| 3220 | 3264 | VVPPAYSMVTAGSE | | | X | Q9NS40 |
| 3221 | 3265 | YCNDGFCEMTGFSR | | | X | Q9NS40 |
| 3222 | 3266 | GISETESDLTYGEV | | | X | Q9NS40 |
| 3223 | 3267 | KKNSSPPSSDKTII | | | X | Q9NS40 |
| 3224 | 3268 | KSRSSSFISSIDDE | | | X | Q9NS40 |
| 3225 | 3269 | IAQIAQALLGSEER | | | X | Q9NS40 |
| 3226 | 3270 | QEQLNRLESQMTTD | | | X | Q9NS40 |
| 3227 | 3271 | EENFKQIYSQFFPQ | | | X | Q9NS61 |
| 3228 | 3272 | GRKESLSDSRDLDG | | | X | Q9NS61 |
| 3229 | 3273 | SLSGVLVIALPVPV | | | X | Q9NSA2 |
| 3230 | 3274 | LGYTLKSCASELGF | | | X | Q9NSA2 |
| 3231 | 3275 | SLLSSCCPRRAKRR | | | X | Q9NSA2 |
| 3232 | 3276 | ARTCGASRPGP | | | X | Q9NY47 |
| 3233 | 3277 | DAELDDPESED | | | X | Q9NY47 |
| 3234 | 3278 | DALLRPLELEN | | | X | Q9NY47 |
| 3235 | 3279 | DDDYVNVASFN | | | X | Q9NY47 |
| 3236 | 3280 | DMVIIVDVSGS | | | X | Q9NY47 |
| 3237 | 3281 | EDVERGSKASTLRL | | | X | Q9NY47 |
| 3238 | 3282 | ELDDPESEDVE | | | X | Q9NY47 |
| 3239 | 3283 | FEKYNWPNRTV | | | X | Q9NY47 |
| 3240 | 3284 | HAQRLTNTNLL | | | X | Q9NY47 |
| 3241 | 3285 | HQDALLRPLEL | | | X | Q9NY47 |
| 3242 | 3286 | KADAELDDPES | | | X | Q9NY47 |
| 3243 | 3287 | KAHRWQDNIKEEDI | | | X | Q9NY47 |
| 3244 | 3288 | LGANGYVFAID | | | X | Q9NY47 |
| 3245 | 3289 | PTVADFLNLAWWTS | | | X | Q9NY47 |
| 3246 | 3290 | QIPTDIYKGSTVIL | | | X | Q9NY47 |
| 3247 | 3291 | RWQDNIKEEDIVYY | | | X | Q9NY47 |
| 3248 | 3292 | SSPKDMVIIVDVSG | | | X | Q9NY47 |
| 3249 | 3293 | TCGASRPGPAR | | | X | Q9NY47 |
| 3250 | 3294 | WARRLEQEVDG | | | X | Q9NY47 |
| 3251 | 3295 | YRRGPHICFDY | | | X | Q9NY47 |
| 3252 | 3296 | YVFKPPHQDAL | | | X | Q9NY47 |
| 3253 | 3297 | YVNVASFNEKAQPV | | | X | Q9NY47 |
| 3254 | 3298 | CKDLNASDNNTEFL | | | X | Q9NY47 |
| 3255 | 3299 | TLVKSLDERYIDEV | | | X | Q9NY47 |
| 3256 | 3300 | LEDLQDLDSLDTEK | | | X | Q9NZQ8 |
| 3257 | 3301 | DTLLGSSERDFFYH | | | X | Q9NZV8 |
| 3258 | 3302 | EQVFEESCMEVATV | | | X | Q9NZV8 |
| 3259 | 3303 | ETQQYFFDRDPDIF | | | X | Q9NZV8 |
| 3260 | 3304 | FEESCMEVATVNRP | | | X | Q9NZV8 |
| 3261 | 3305 | HECISAYDEELAFF | | | X | Q9NZV8 |
| 3262 | 3306 | KTTNHEFVDEQVFE | | | X | Q9NZV8 |
| 3263 | 3307 | NHEFVDEQVFEESC | | | X | Q9NZV8 |
| 3264 | 3308 | PFARAAAIGWMPVA | | | X | Q9NZV8 |
| 3265 | 3309 | YHPETQQYFFDRDP | | | X | Q9NZV8 |
| 3266 | 3310 | YPRHECISAYDEEL | | | X | Q9NZV8 |
| 3267 | 3311 | YVTTAIISIPTPPV | | | X | Q9NZV8 |
| 3268 | 3312 | KRRAQKKARLARIR | | | X | Q9NZV8 |
| 3269 | 3313 | LDTACVMIFTVEYL | | | X | Q9NZV8 |
| 3270 | 3314 | LVMTDNEDVSGAFV | | | X | Q9NZV8 |
| 3271 | 3315 | YIGLVMTDNEDVSG | | | X | Q9NZV8 |
| 3272 | 3316 | AGGGGAGSEHS | | | X | Q9P0X4 |
| 3273 | 3317 | ANYRWVHHKYN | | | X | Q9P0X4 |
| 3274 | 3318 | DATPHTLVQPIPAT | | | X | Q9P0X4 |
| 3275 | 3319 | DEEEIDYTLCF | | | X | Q9P0X4 |
| 3276 | 3320 | DEGRHLGSRHCQTL | | | X | Q9P0X4 |
| 3277 | 3321 | DNRDSVDLAELVPA | | | X | Q9P0X4 |
| 3278 | 3322 | DRGDRGEDEEEIDY | | | X | Q9P0X4 |
| 3279 | 3323 | DRGEDEEEIDYTLC | | | X | Q9P0X4 |
| 3280 | 3324 | DSSQAPPSPFS | | | X | Q9P0X4 |
| 3281 | 3325 | DVYKPDWCEVREDW | | | X | Q9P0X4 |
| 3282 | 3326 | ECCLSKDDVYD | | | X | Q9P0X4 |
| 3283 | 3327 | EDGASSELGKEEEE | | | X | Q9P0X4 |
| 3284 | 3328 | EDQSSSNIEEF | | | X | Q9P0X4 |
| 3285 | 3329 | EEEEEEQADGA | | | X | Q9P0X4 |
| 3286 | 3330 | FNPVRSWLKHDSSQ | | | X | Q9P0X4 |
| 3287 | 3331 | GAGGGGAGSEHSET | | | X | Q9P0X4 |
| 3288 | 3332 | GASSELGKEEE | | | X | Q9P0X4 |
| 3289 | 3333 | GEDEEEIDYTL | | | X | Q9P0X4 |
| 3290 | 3334 | GKEEEEEEQAD | | | X | Q9P0X4 |
| 3291 | 3335 | GKFYHCLGVDTRNI | | | X | Q9P0X4 |
| 3292 | 3336 | GSLQTTLEDSLTLS | | | X | Q9P0X4 |
| 3293 | 3337 | GSSAGGEDEAD | | | X | Q9P0X4 |
| 3294 | 3338 | KDPPGRAPLPM | | | X | Q9P0X4 |
| 3295 | 3339 | KEAQEDAEMDAELE | | | X | Q9P0X4 |
| 3296 | 3340 | KFSLRTDTGDTVPD | | | X | Q9P0X4 |
| 3297 | 3341 | KMGDRGDRGEDEEE | | | X | Q9P0X4 |
| 3298 | 3342 | LDAVAVDQQPV | | | X | Q9P0X4 |
| 3299 | 3343 | LDSSGDPKLCPIPM | | | X | Q9P0X4 |
| 3300 | 3344 | LEGELTIIDNL | | | X | Q9P0X4 |
| 3301 | 3345 | LERPQIEAGSTERI | | | X | Q9P0X4 |
| 3302 | 3346 | LTSLFCPPPPP | | | X | Q9P0X4 |
| 3303 | 3347 | LVALGSRKSSV | | | X | Q9P0X4 |
| 3304 | 3348 | MKHLDDSNKEA | | | X | Q9P0X4 |
| 3305 | 3349 | MRVGDLGECFFPLS | | | X | Q9P0X4 |
| 3306 | 3350 | NFLCEMEEIPF | | | X | Q9P0X4 |
| 3307 | 3351 | PAPGHEDCNGRMPS | | | X | Q9P0X4 |
| 3308 | 3352 | PDASSPLLPMPAEF | | | X | Q9P0X4 |
| 3309 | 3353 | PENFLCEMEEI | | | X | Q9P0X4 |
| 3310 | 3354 | PGLEEPLDGAD | | | X | Q9P0X4 |
| 3311 | 3355 | PRRALGPPAPA | | | X | Q9P0X4 |
| 3312 | 3356 | PSPFSPDASSP | | | X | Q9P0X4 |
| 3313 | 3357 | QEDAEMDAELELEM | | | X | Q9P0X4 |
| 3314 | 3358 | RGLRAHQRSHS | | | X | Q9P0X4 |
| 3315 | 3359 | RGPGGAGGGGD | | | X | Q9P0X4 |
| 3316 | 3360 | RILVNLLLDTL | | | X | Q9P0X4 |
| 3317 | 3361 | RSAAWASRRSS | | | X | Q9P0X4 |
| 3318 | 3362 | SAERGGGARVC | | | X | Q9P0X4 |
| 3319 | 3363 | SDRSSSILLGD | | | X | Q9P0X4 |
| 3320 | 3364 | SGDPKLCPIPMTPN | | | X | Q9P0X4 |
| 3321 | 3365 | SLFCPPPPPPA | | | X | Q9P0X4 |
| 3322 | 3366 | SLTSLFCPPPPPPA | | | X | Q9P0X4 |
| 3323 | 3367 | SPDASSPLLPM | | | X | Q9P0X4 |
| 3324 | 3368 | SSELGKEEEEE | | | X | Q9P0X4 |
| 3325 | 3369 | SSPLLPMPAEF | | | X | Q9P0X4 |
| 3326 | 3370 | TPHTLVQPIPA | | | X | Q9P0X4 |
| 3327 | 3371 | TVASYAEPGDCYEE | | | X | Q9P0X4 |
| 3328 | 3372 | VIFQVITLEGWVEI | | | X | Q9P0X4 |
| 3329 | 3373 | VTLGMYQPCDDMDC | | | X | Q9P0X4 |
| 3330 | 3374 | VYDFGAGRQDL | | | X | Q9P0X4 |
| 3331 | 3375 | YNGLDAVAVDQQPV | | | X | Q9P0X4 |
| 3332 | 3376 | ASSELGKEEEEEEQ | | | X | Q9P0X4 |
| 3333 | 3377 | LNSDRSSSILLGDD | | | X | Q9P0X4 |
| 3334 | 3378 | SYSDEDQSSSNIEE | | | X | Q9P0X4 |
| 3335 | 3379 | AFSLNSDRSSSILL | | | X | Q9P0X4 |
| 3336 | 3380 | DNLSGSIFHHYSSP | | | X | Q9P0X4 |
| 3337 | 3381 | DRSSSILLGDDLSL | | | X | Q9P0X4 |
| 3338 | 3382 | HDKQEVQLAETEAF | | | X | Q9P0X4 |
| 3339 | 3383 | MHIFGCKFSLRTDT | | | X | Q9P0X4 |
| 3340 | 3384 | SGSIFHHYSSPAGC | | | X | Q9P0X4 |
| 3341 | 3385 | AHICNGTNLTM | | | X | Q9UBN1 |
| 3342 | 3386 | FGALSFIVAETVGV | | | X | Q9UBN1 |
| 3343 | 3387 | GHCFRINHFPE | | | X | Q9UBN1 |
| 3344 | 3388 | LTTAGAFAAFS | | | X | Q9UBN1 |
| 3345 | 3389 | LYSSAHICNGTNLT | | | X | Q9UBN1 |
| 3346 | 3390 | NHFPEDNDYDH | | | X | Q9UBN1 |
| 3347 | 3391 | PSRDVSPMGLK | | | X | Q9UBN1 |
| 3348 | 3392 | RMPSYRYRRRR | | | X | Q9UBN1 |
| 3349 | 3393 | VAETVGVLAVN | | | X | Q9UBN1 |
| 3350 | 3394 | YWLYSSAHICN | | | X | Q9UBN1 |
| 3351 | 3395 | EDNDYDHDSSEYLL | | | X | Q9UBN1 |
| 3352 | 3396 | HFPEDNDYDHDSSE | | | X | Q9UBN1 |
| 3353 | 3397 | RINHFPEDNDYDHD | | | X | Q9UBN1 |
| 3354 | 3398 | SYRYRRRRSRSSSR | | | X | Q9UBN1 |
| 3355 | 3399 | SFAFAAISFLLTES | | | X | Q9UF02 |
| 3356 | 3400 | SSEASLQMNSNYPA | | | X | Q9UF02 |
| 3357 | 3401 | AYLTWDRDQYD | | | X | Q9UGM1 |
| 3358 | 3402 | CLSPHHSRERD | | | X | Q9UGM1 |
| 3359 | 3403 | DFIEDVEWEVH | | | X | Q9UGM1 |
| 3360 | 3404 | DFIEDVEWEVHGMP | | | X | Q9UGM1 |
| 3361 | 3405 | DIVLYNKADDE | | | X | Q9UGM1 |
| 3362 | 3406 | DLSDFIEDVEWEVH | | | X | Q9UGM1 |
| 3363 | 3407 | DLVWRPDIVLY | | | X | Q9UGM1 |
| 3364 | 3408 | DSGDLSDFIED | | | X | Q9UGM1 |
| 3365 | 3409 | DSGDLSDFIEDVEW | | | X | Q9UGM1 |
| 3366 | 3410 | EDYSNALRPVEDTD | | | X | Q9UGM1 |
| 3367 | 3411 | FQLMVAEIMPA | | | X | Q9UGM1 |
| 3368 | 3412 | GDLSDFIEDVE | | | X | Q9UGM1 |
| 3369 | 3413 | IATMALITASTALT | | | X | Q9UGM1 |
| 3370 | 3414 | LTKVYSKLPESNLK | | | X | Q9UGM1 |
| 3371 | 3415 | PAITKSSCVVD | | | X | Q9UGM1 |
| 3372 | 3416 | PHWARVVILKY | | | X | Q9UGM1 |
| 3373 | 3417 | QKLFNDLFEDY | | | X | Q9UGM1 |
| 3374 | 3418 | RDHLTKVYSKLPES | | | X | Q9UGM1 |
| 3375 | 3419 | TVFQLMVAEIMPAS | | | X | Q9UGM1 |
| 3376 | 3420 | VHGMPAVKNVISYG | | | X | Q9UGM1 |
| 3377 | 3421 | VLRYDGLITWD | | | X | Q9UGM1 |
| 3378 | 3422 | VVDVTYFPFDN | | | X | Q9UGM1 |
| 3379 | 3423 | AITKSSC | | | X | Q9UGM1 |
| 3380 | 3424 | DFIEDVE | | | X | Q9UGM1 |
| 3381 | 3425 | DLSDFIEDVEWEV | | | X | Q9UGM1 |
| 3382 | 3426 | DSGDLSDFIEDVE | | | X | Q9UGM1 |
| 3383 | 3427 | GAEARPV | | | X | Q9UGM1 |
| 3384 | 3428 | GDLSDFIEDVEWE | | | X | Q9UGM1 |
| 3385 | 3429 | LTFGSWTYNGNQV | | | X | Q9UGM1 |
| 3386 | 3430 | LYNKADDESSEPV | | | X | Q9UGM1 |
| 3387 | 3431 | SFLAPLS | | | X | Q9UGM1 |
| 3388 | 3432 | SGDLSDFIEDVEW | | | X | Q9UGM1 |
| 3389 | 3433 | YNGNQVD | | | X | Q9UGM1 |
| 3390 | 3434 | ASMDQISAITDSAE | | | X | Q9UHC6 |
| 3391 | 3435 | DQISAITDSAEYCE | | | X | Q9UHC6 |
| 3392 | 3436 | HTSVMTGSLLDDHH | | | X | Q9UHC6 |
| 3393 | 3437 | IYGHTSVMTGSLLD | | | X | Q9UHC6 |
| 3394 | 3438 | LPYRFRNKKMKTLK | | | X | Q9UHC6 |
| 3395 | 3439 | MQAAPRAGCGAALL | | | X | Q9UHC6 |
| 3396 | 3440 | NGVNRNSAIIGGVI | | | X | Q9UHC6 |
| 3397 | 3441 | SSRVDNAPDQQNSH | | | X | Q9UHC6 |
| 3398 | 3442 | VDNAPDQQNSHPDL | | | X | Q9UHC6 |
| 3399 | 3443 | VYSASMDQISAITD | | | X | Q9UHC6 |
| 3400 | 3444 | CDDYDVTCNEFFFD | | | X | Q9UIX4 |
| 3401 | 3445 | DASFHPAFLPQRQA | | | X | Q9UIX4 |
| 3402 | 3446 | EEFAEMVEREEEDD | | | X | Q9UIX4 |
| 3403 | 3447 | LLPGDNSDYDYSAL | | | X | Q9UIX4 |
| 3404 | 3448 | LLREMCALSFQEEL | | | X | Q9UIX4 |
| 3405 | 3449 | LNVCDDYDVTCNEF | | | X | Q9UIX4 |
| 3406 | 3450 | MVERPHSGLPGKVF | | | X | Q9UIX4 |
| 3407 | 3451 | NLSVSTLPSLREEE | | | X | Q9UIX4 |
| 3408 | 3452 | TNFDDILNVCDDYD | | | X | Q9UIX4 |
| 3409 | 3453 | TPGQVVALSSILSG | | | X | Q9UIX4 |
| 3410 | 3454 | EEEEQGHCSQMCHN | | | X | Q9UIX4 |
| 3411 | 3455 | EFPLTRLGQLKACT | | | X | Q9UIX4 |
| 3412 | 3456 | MVEREEEDDALDSE | | | X | Q9UIX4 |
| 3413 | 3457 | RVMFRRAQFLIKTK | | | X | Q9UIX4 |
| 3414 | 3458 | DDYDVSRDEFFFDR | | | X | Q9UJ96 |
| 3415 | 3459 | ECSPKCRSLFVLET | | | X | Q9UJ96 |
| 3416 | 3460 | GHDDLLRVCDDYDV | | | X | Q9UJ96 |
| 3417 | 3461 | HSATATEDSSQGPD | | | X | Q9UJ96 |
| 3418 | 3462 | PLARLERLRACRGH | | | X | Q9UJ96 |
| 3419 | 3463 | TERGAQGSPARALG | | | X | Q9UJ96 |
| 3420 | 3464 | LLLFLCVAMALFAP | | | X | Q9UJ96 |
| 3421 | 3465 | RALGPRGRLQRGRR | | | X | Q9UJ96 |
| 3422 | 3466 | RRCAREFGLLLLFL | | | X | Q9UJ96 |
| 3423 | 3467 | VCDDYDVSRDEFFF | | | X | Q9UJ96 |
| 3424 | 3468 | ASTSGLLQPLCVDT | | | X | Q9ULD8 |
| 3425 | 3469 | FDLLHAFKVNVYFG | | | X | Q9ULD8 |
| 3426 | 3470 | FWCLLDVIPIKNEK | | | X | Q9ULD8 |
| 3427 | 3471 | GIEDGCGSDQPKFS | | | X | Q9ULD8 |
| 3428 | 3472 | NTLMSTLEEKETDG | | | X | Q9ULD8 |
| 3429 | 3473 | PRRTAPRPRLGGRG | | | X | Q9ULD8 |
| 3430 | 3474 | RRRYGRARSKGFNA | | | X | Q9ULD8 |
| 3431 | 3475 | RTTFVSKSGQVVFA | | | X | Q9ULD8 |
| 3432 | 3476 | TVSPAPADEPSSPL | | | X | Q9ULD8 |
| 3433 | 3477 | TWAVNNGIDTTELL | | | X | Q9ULD8 |
| 3434 | 3478 | VCDLAVEVLFILDI | | | X | Q9ULD8 |
| 3435 | 3479 | VVDGIEDGCGSDQP | | | X | Q9ULD8 |
| 3436 | 3480 | YITSLYFALSSLTS | | | X | Q9ULD8 |
| 3437 | 3481 | LLDVIPIKNEKGEV | | | X | Q9ULD8 |
| 3438 | 3482 | DLCSEPSTPASPPP | | | X | Q9ULD8 |
| 3439 | 3483 | KHKLNKGVFGEKPN | | | X | Q9ULD8 |
| 3440 | 3484 | LNFRTTFVSKSGQV | | | X | Q9ULD8 |
| 3441 | 3485 | ATVSMTTVGYGDVV | | | X | Q9ULS6 |
| 3442 | 3486 | AYTIEKEENEGLAT | | | X | Q9ULS6 |
| 3443 | 3487 | FQIPDSQGNPGEDP | | | X | Q9ULS6 |
| 3444 | 3488 | GNFRRQLWLALDNP | | | X | Q9ULS6 |
| 3445 | 3489 | HSREAILELCDDYD | | | X | Q9ULS6 |
| 3446 | 3490 | STTSSFDEILAFYN | | | X | Q9ULS6 |
| 3447 | 3491 | VFSFSQEIEYWGIN | | | X | Q9ULS6 |
| 3448 | 3492 | CDDYDDVQREFYFD | | | X | Q9ULS6 |
| 3449 | 3493 | LELCDDYDDVQREF | | | X | Q9ULS6 |
| 3450 | 3494 | ACSLDLHKFPMDKQ | | | X | Q9UN88 |
| 3451 | 3495 | AQAPLASPESLGSL | | | X | Q9UN88 |
| 3452 | 3496 | FYSRGPRRQPRRHR | | | X | Q9UN88 |
| 3453 | 3497 | ILVCLFFVFLSLLE | | | X | Q9UN88 |
| 3454 | 3498 | KCDTNSTWGLNDDE | | | X | Q9UN88 |
| 3455 | 3499 | RGPRRQPRRHRRPR | | | X | Q9UN88 |
| 3456 | 3500 | PRRQPRRHRRPRRV | | | X | Q9UN88 |
| 3457 | 3501 | QREVNSYLVQVYWP | | | X | Q9UN88 |
| 3458 | 3502 | CIWYVIGRREMEAN | | | X | Q9UQ05 |
| 3459 | 3503 | EICFYRKDGSAFWC | | | X | Q9UQ05 |
| 3460 | 3504 | ELRHIMGLLQARLG | | | X | Q9UQ05 |
| 3461 | 3505 | HKALEGHQEHRAEI | | | X | Q9UQ05 |
| 3462 | 3506 | KTLPSITEAESGAE | | | X | Q9UQ05 |
| 3463 | 3507 | LEGHQEHRAEICFY | | | X | Q9UQ05 |
| 3464 | 3508 | LPRPLKQRMLEYFQ | | | X | Q9UQ05 |
| 3465 | 3509 | NLRQGSDTSGLSRF | | | X | Q9UQ05 |
| 3466 | 3510 | PSITEAESGAEPGG | | | X | Q9UQ05 |
| 3467 | 3511 | REILQLPLFGAASR | | | X | Q9UQ05 |
| 3468 | 3512 | RPSPELASEAEEVK | | | X | Q9UQ05 |
| 3469 | 3513 | VDGIEDSGSTAEAP | | | X | Q9UQ05 |
| 3470 | 3514 | VHRLPRPLKQRMLE | | | X | Q9UQ05 |
| 3471 | 3515 | GDALQAHYYVCSGS | | | X | Q9UQ05 |
| 3472 | 3516 | LPSITEAESGAEPG | | | X | Q9UQ05 |
| 3473 | 3517 | PYNVCFSGDDDTPI | | | X | Q9UQ05 |
| 3474 | 3518 | SDIAVEMLFILDII | | | X | Q9UQ05 |
| 3475 | 3519 | SQPRSESLGSSSDK | | | X | Q9UQ05 |
| 3476 | 3520 | GSDSSDSELELSTV | | | X | Q9Y2W7 |
| 3477 | 3521 | SSTAPQGSDSSDSE | | | X | Q9Y2W7 |
| 3478 | 3522 | ASPVGIKGFNT | | | X | Q9Y698 |
| 3479 | 3523 | FYFGALSFIIA | | | X | Q9Y698 |
| 3480 | 3524 | GIKGFNTLPST | | | X | Q9Y698 |
| 3481 | 3525 | KGFNTLPSTEISMY | | | X | Q9Y698 |
| 3482 | 3526 | LLFMGGLCIAASEF | | | X | Q9Y698 |
| 3483 | 3527 | PEDADYEADTAEYF | | | X | Q9Y698 |
| 3484 | 3528 | RIPSYRYRYQRRSR | | | X | Q9Y698 |
| 3485 | 3529 | SLHSNTANRRT | | | X | Q9Y698 |
| 3486 | 3530 | VHMFIDRHKQL | | | X | Q9Y698 |
| 3487 | 3531 | VLAVHMFIDRHKQL | | | X | Q9Y698 |
| 3488 | 3532 | WLYSRGVCKTKSVS | | | X | Q9Y698 |
| 3489 | 3533 | IKGFNTLPSTEISM | | | X | Q9Y698 |
| 3490 | 3534 | LLTTVGAFAAFSLM | | | X | Q9Y698 |
| 3491 | 3535 | PVGIKGFNTLPSTE | | | X | Q9Y698 |
| 3492 | 3536 | SFYFGALSFIIAEM | | | X | Q9Y698 |

[0054] An extensive list of top autoantigens involved in neurological or neuropsychiatric conditions is provided in Table 2 below. See e.g. Prüss, 2021; Garza et al., 2021; Giannoccaro et al. 2018; Gardoni et al 2021. In addition, Hansen & TimAus, 2021 provide a review with a special focus on autoantibodies in psychiatric conditions, most importantly autoimmune encephalitis with psychiatric syndromes and related diseases. Galli et al, 2020, provide a review about the role of autoantibodies in paraneoplastic diseases. 2020). Also relevant are intracellular antigens such as Ma2[Ta], Hu, Ri, Yo, CV2/CRMP5, amphiphysin, GAD65, and antinuclear antigens (ANAs), or thyroid tissue antigens such as TG, TPO or TRAK in the context of neurological diseases.

[0055] Table 3 below is a selection from Table 1 and lists peptides based on the top autoantigens of Table 2 found in the autoantibody screen performed in the course of the present invention.

TABLE 2
Examples of autoantigens associated with neurological or
neuropsychiatric conditions

| autoantigen | UniProt | associated diseases or symptoms |
|---|---|---|
| Acetylcholine receptor subunit | P02708 | Myasthenia Gravis |
| alpha | | |
| AMPA receptors (Glutamate | P42262, P42261, P42263, | Limbic encephalitis, seizures, |
| receptors) | P48058 | memory loss |
| Amphiphysin | P49418 | limbic encephalitis, paraneoplastic |
| | | syndr., stiff man syndr. |
| Aquaporin-4 | P55087 | neuromyelitis optica (NMOSD), MS |
| CASPR2 | Q9UHC6 | LGI1-like, neuromyotonia, Morvan's |
| | | syndrome, neuropathic pain |
| CV2/CRMP5 | Q9BPU6 | Paraneoplastic striatal encephalitis, |
| | | myelitis, optic neuritis and retinitis |
| D2R | P14416 | Parkinsonism, chorea, psychosis, |
| | | dystonia, mutism, psychiatric syndr, |
| | | movement disorders |
| DPPX | P42658 | encephalitis, Confusion, |
| | | hallucinations, prodromal |
| | | diarrhoea, memory loss, |
| | | hyperexcitability |
| ephrin-B2 | P52799 | encephalitis psychiatric syndrome |
| Folate receptor alpha | P15328 | autism spectrum disorders |
| GABAA receptor | P14867, P47869, P34903, | Seizures, status epilepticus, |
| | P48169, P31644, Q16445 | psychosis |
| GABAB receptor | P18505, P47870, P28472 | Limbic encephalitis, seizures, |
| | | memory loss |
| GAD65 | Q05329 | encephalitis; seizures and chronic |
| | | epilepsy |
| Glycine receptor | P23415 | Encephalomyelitis, rigidity, |
| | | myoclonus, seizures, stiff person |
| | | syndrome |
| IgLON5 | A6NGN9 | Parasomnia, sleep apnoea, |
| | | cognitive impairment, gait |
| | | abnormalities |
| LGI1 | O95970 | Limbic encephalitis (seizures, |
| | | cognitive impairment), |
| | | faciobrachial dystonic seizures, |
| | | neuromyotonia |
| Ma2[Ta] | PNMA2 | paraneoplastic syndrome |
| mGluR1 | Q13255 | Anti-mGluR1 encephalitis, |
| | | cerebellar ataxia |
| mGluR5 | P41594 | Anti-mGluR5 encephalitis associates |
| | | with a complex neuropsychiatric |
| | | syndrome |
| MOG | Q16653 | Optic neuritis, myelitis, ADEM |
| MuSK | O15146 | Myasthenia Gravis |
| Neurexin 3α | Q9Y4C0 | encephalitis (NMDAR encephalitis) |
| NMDAR | Q05586, Q12879, Q13224, | Encephalitis, psychosis, amnesia, |
| | Q14957, O15399, Q8TCU5, | behavioural abnormalities, |
| | Q5F015 | seizures, dysautonomia, autism, |
| | | Tourette, ADHD |
| Septin 5 | Q99719 | Cerebellar ataxia, oscillopsia |
| Synapsin | P17600 | limbic encephalitis |
| TDP-43 | Q13148 | ALS |
| TG (thyroid) | P01266 | thyroid disorder |
| TPO (thyroid) | P07202 | thyroid disorder |
| TRAK (thyroid) | P16473 | thyroid disorder |
| VGKC | Q09470 | limbic encephalitis |
| Voltage-dependent P/Q-type | O00555, Q13936, Q00975, | headache with neurological deficits |
| calcium channel subunit alpha- | Q01668, Q15878, O60840, | and lymphocytosis (HaNDL) |
| 1A | O43497, O95180, Q9POX4 | |

TABLE 3
Peptide hits based on autoantigens of Table 2

| peptide # | peptide sequence | Protein (UniProt) |
|---|---|---|
| 1 | GQPGAQRMYKQ | O00555 |
| 7 | SSPAPLGGQET | O43497 |
| 14 | ASAGGAKILGVLRV | O95180 |
| 18 | LINVDEVNQIVTTN | P02708 |
| 44 | AVTGVNKIELPQFS | P18505 |
| 61 | YTIMTAHFHLKRKI | P31644 |
| 72 | CTPCKENEYVFDEY | P41594 |
| 73 | NTQNFKPAPATNTQ | P42263 |
| 84 | LPSTCLQKVEEQPE | Q00975 |
| 87 | AMDILNMVFTGVFT | Q01668 |
| 96 | FIWDSAVLEFEASQ | Q05586 |
| 104 | AGESTFANNKSSVP | Q13224 |
| 112 | AGYPSTVSTVE | Q13936 |
| 119 | GAAHVHGIVFEDNV | Q14957 |
| 126 | LGRSNTIGSAP | Q15878 |
| 128 | LFPVAFAGFNLVYW | Q16445 |
| 132 | DMNFDFDLYIVGDG | Q8TCU5 |
| 144 | DEEGRGGAGGGGAG | Q9P0X4 |
| 158 | ILYAGNDRWTSDPR | A6NGN9 |
| 190 | AAFMIQEEYVDTVS | O15399 |
| 229 | CGGILETTLVE | O60840 |
| 323 | GKTRTSLKTMSRRK | P14416 |
| 330 | TWTLKKLPLSLSFL | P16473 |
| 380 | MAVCLLFVFSALLE | P23415 |
| 435 | LNQYDLLGHVVGTE | P34903 |
| 465 | ANQFEGNDRYEGYC | P42261 |
| 473 | MRSAEPSVFVRTTA | P42262 |
| 481 | LHRQNEEPVFSKDG | P42658 |
| 497 | NMQFLLFVFLVWDP | P47869 |
| 598 | TTVIYNSNIFTDPF | Q09470 |
| 603 | KFSYIPEAKASCYG | Q12879 |
| 626 | RERLPKARVVVCFC | Q13255 |
| 799 | AIRNGVNRNSAIIG | Q9UHC6 |
| 963 | KDNKGYCAQYRGEV | O15146 |
| 1348 | AYFLCLLSALLLTE | O95970 |
| 1642 | AVCYAFVFSALIEF | P14867 |
| 1952 | VVCCAQSVNDPGNM | P28472 |
| 2213 | AVCAQSVNDPSNMS | P47870 |
| 2218 | DIYVTSFGPVSDVE | P48169 |
| 2241 | EITIGAEPKETTED | P49418 |

[0056] In light of the findings described in Tables 1-3 above as well as in Example 12, a particularly preferred embodiment is directed to the inventive compound wherein, for at least one of the peptides (preferably for each of the peptides), said amino-acid fragment comprises at least 4, preferably at least 5 or even at least 6, more preferably at least 7 or even at least 8, yet more preferably at least 9, even more preferably at least 10, yet even more preferably at least 11, especially at least 12 or even 13 consecutive amino acids of a sequence identified by any one of SEQ ID NOs: 45-3536, preferably any one of SEQ ID NOs: 45-863, especially any one of SEQ ID NOs: 45-201, optionally wherein at most three, preferably at most two, more preferably at most one amino acid is independently substituted by any other amino acid.

[0057] According to yet another preference, the peptides used in the compound of the present invention (e.g. peptide P or Pa or P_{b} or P₁ or P₂) comprise at least 4, preferably at least 5 or even at least 6, more preferably at least 7 or even at least 8, yet more preferably at least 9, even more preferably at least 10, yet even more preferably at least 11, especially at least 12 or even 13 consecutive amino acids of a sequence identified by any one of SEQ ID NOs: 45-3536, preferably any one of SEQ ID NOs: 45-863, especially any one of SEQ ID NOs: 45-201, optionally wherein at most three, preferably at most two, more preferably at most one amino acid is independently substituted by any other amino acid.

[0058] According to another preferred embodiment, the respective amino acid sequences of the at least two peptides of the inventive compound are the same. In other words, the at least two peptides are identical.

[0059] Narcolepsy type 1 is another autoantibody-associated disease (see e.g. Vuorela et al, 2021). The involved autoantigen turned out to be protein-O-mannosyltransferase 1 (POMT1), UniProt accession number Q9Y6A1. More specifically, one autoepitope discovered was located in residues 697-711 of UniProt accession number Q9Y6A1. Accordingly, POMT1 is a particularly preferred target of the present invention. Even more preferably, said amino-acid fragment comprises at least 4, preferably at least 5 or even at least 6, more preferably at least 7 or even at least 8, yet more preferably at least 9, even more preferably at least 10, yet even more preferably at least 11, especially at least 12 or even 13 consecutive amino acids of residues 697-711 of UniProt accession number Q9Y6A1, optionally wherein at most three, preferably at most two, more preferably at most one amino acid is independently substituted by any other amino acid.

[0060] Preferably, in the entire context of the present invention, the at least two peptides comprise a peptide P₁ and a peptide P₂, wherein P₁ and P₂ independently comprise a 6-, preferably a 7-, more preferably an 8-, even more preferably a 9-, even more preferably a 10-, yet even more preferably an 11-, especially a 12-, most preferably a 13-amino-acid fragment of an amino-acid sequence as disclosed hereinabove (by the indicated neuroreceptors and/or UniProt accession numbers), wherein P₁ and P₂ are present in form of a peptide dimer P₁-S-P₂, wherein S is a non-peptide spacer, wherein the peptide dimer is covalently bound to the biopolymer scaffold, preferably via a linker.

[0061] A preferred embodiment of the inventive compound relates to a compound comprising
[0062] a biopolymer scaffold and at least
[0063] a first peptide n-mer of the general formula:

P(-S-P)₍ₙ₋₁₎ and
[0064] a second peptide n-mer of the general formula:

P(-S-P)₍ₙ₋₁₎;
[0065] wherein, independently for each occurrence, P is a peptide and S is a non-peptide spacer,
[0066] wherein, independently for each of the peptide n-mers, n is an integer of at least 1, preferably of at least 2, more preferably of at least 3, especially of at least 4,
[0067] wherein each of the peptide n-mers is bound to the biopolymer scaffold, preferably via a linker each. “P” in this context is defined, independently for each occurrence, in the same way as disclosed for the at least two peptides of the inventive compound and/or as for P₁ and P₂ defined above.

[0068] The biopolymer scaffold used in the present invention may be a mammalian biopolymer such as a human biopolymer, a non-human primate biopolymer, a sheep biopolymer, a pig biopolymer, a dog biopolymer or a rodent biopolymer. In particular the biopolymer scaffold is a protein, especially a (non-modified or non-modified with respect to its amino-acid sequence) plasma protein. Preferably, the biopolymer scaffold is a mammalian protein such as a human protein, a non-human primate protein, a sheep protein, a pig protein, a dog protein or a rodent protein. Typically, the biopolymer scaffold is a non-immunogenic and/or non-toxic protein that preferably circulates in the plasma of healthy (human) individuals and can e.g. be efficiently scavenged or recycled by scavenging receptors, such as e.g. present on myeloid cells or on liver sinusoidal endothelial cells (reviewed by Sorensen et al 2015).

[0069] According to a particular preference, the biopolymer scaffold is a (preferably human) globulin, preferably selected from the group consisting of immunoglobulins, alpha1-globulins, alpha2-globulins and beta-globulins, in particular immunoglobulin G, haptoglobin and transferrin. Haptoglobin in particular has several advantageous properties, as shown in Examples 5-9, especially an advantageous safety profile.

[0070] The biopolymer scaffold may also be (preferably human) albumin, hemopexin, alpha-1-antitrypsin, C1 esterase inhibitor, lactoferrin or non-immunogenic (i.e. non-immunogenic in the individual to be treated) fragments of all of the aforementioned proteins, including the globulins.

[0071] In another preference, the biopolymer scaffold is an anti-CD163 antibody (i.e. an antibody specific for a CD163 protein) or CD163-binding fragment thereof.

[0072] Human CD163 (Cluster of Differentiation 163) is a 130 kDa membrane glycoprotein (formerly called M130) and prototypic class I scavenger receptor with an extracellular portion consisting of nine scavenger receptor cysteine-rich (SRCR) domains that are responsible for ligand binding. CD163 is an endocytic receptor present on macrophages and monocytes, it removes hemoglobin/haptoglobin complexes from the blood but it also plays a role in anti-inflammatory processes and wound healing. Highest expression levels of CD163 are found on tissue macrophages (e.g. Kupffer cells in the liver) and on certain macrophages in spleen and bone marrow. Because of its tissue- and cell-specific expression and entirely unrelated to depletion of undesirable antibodies, CD163 is regarded as a macrophage target for drug delivery of e.g. immunotoxins, liposomes or other therapeutic compound classes (Skytthe et al., 2020).

[0073] Monoclonal anti-CD163 antibodies and the SRCR domains they are binding are for instance disclosed in Madsen et al., 2004, in particular FIG. 7. Further anti-CD163 antibodies and fragments thereof are e.g. disclosed in WO 2002/032941 A2 or WO 2011/039510 A2. At least two structurally different binding sites for ligands were mapped by using domain-specific antibodies such as e.g. monoclonal antibody (mAB) EDhul (see Madsen et al, 2004). This antibody binds to the third SRCR of CD163 and competes with hemoglobin/haptoglobin binding to CD163. Numerous other antibodies against different domains of CD163 were previously described in the literature, including Mac2-158, KiM8, GHI/61 and RM3/1, targeting SRCR domains 1, 3, 7 and 9, respectively. In addition, conserved bacterial binding sites were mapped and it was demonstrated that certain antibodies were able to inhibit either bacterial binding but not hemoglobin/haptoglobin complex binding and vice versa. This points to different modes of binding and ligand interactions of CD163 (Fabriek et al, 2009; see also citations therein).

[0074] Entirely unrelated to depletion of undesirable antibodies, CD163 was proposed as a target for cell-specific drug delivery because of its physiological properties. Tumor-associated macrophages represent one of the main targets where the potential benefit of CD163-targeting is currently explored. Remarkably, numerous tumors and malignancies were shown to correlate with CD163 expression levels, supporting the use of this target for tumor therapy. Other proposed applications include CD163 targeting by anti-drug conjugates (ADCs) in chronic inflammation and neuroinflammation (reviewed in Skytthe et al., 2020). Therefore, CD163-targeting by ADCs notably with dexamethasone or stealth liposome conjugates represents therapeutic principle which is currently studied (Graversen et al., 2012; Etzerodt et al., 2012).

[0075] In that context, there are references indicating that anti-CD163 antibodies can be rapidly internalized by endocytosis when applied in vivo. This was shown for example for mAB Ed-2 (Dijkstra et al., 1985; Graversen et al., 2012) or for mAB Mac2-158/KN2/NRY (Granfeldt et al., 2013). Based on those observations in combination with observations made in the course of the present invention (see in particular example section), anti-CD163 antibodies and CD163-binding turned out to be highly suitable biopolymer scaffolds for depletion/sequestration of undesirable antibodies.

[0076] Numerous anti-CD163 antibodies and CD163-binding fragments thereof are known in the art (see e.g. above). These are suitable to be used as a biopolymer scaffold for the present invention. For instance, any anti-CD163 antibody or fragment thereof mentioned herein or in WO 2011/039510 A2 (which is included herein by reference) may be used as a biopolymer scaffold in the invention. Preferably, the biopolymer scaffold of the inventive compound is antibody Mac2-48, Mac2-158, 5C6-FAT, BerMac3, or E10B10 as disclosed in WO 2011/039510, in particular humanised Mac2-48 or Mac2-158 as disclosed in WO 2011/039510 A2.

[0077] In a preferred embodiment, the anti-CD163 antibody or CD163-binding fragment thereof comprises a heavy-chain variable (V_{H}) region comprising one or more complementarity-determining region (CDR) sequences selected from the group consisting of SEQ ID NOs: 11-13 of WO 2011/039510 A2.

[0078] In addition, or alternatively thereto, in a preferred embodiment, the anti-CD163 antibody or CD163-binding fragment thereof comprises a light-chain variable (V_{L}) region comprising one or more CDR sequences selected from the group consisting of SEQ ID NOs: 14-16 of WO 2011/039510 A2 or selected from the group consisting of SEQ ID NOs:17-19 of WO 2011/039510 A2.

[0079] In a further preferred embodiment, the anti-CD163 antibody or CD163-binding fragment thereof comprises a heavy-chain variable (V_{H}) region comprising or consisting of the amino acid sequence of SEQ ID NO: 20 of WO 2011/039510 A2.

[0080] In addition, or alternatively thereto, in a preferred embodiment, the anti-CD163 antibody or CD163-binding fragment thereof comprises a light-chain variable (V_{L}) region comprising or consisting of the amino acid sequence of SEQ ID NO: 21 of WO 2011/039510 A2.

[0081] In a further preferred embodiment, the anti-CD163 antibody or CD163-binding fragment thereof comprises a heavy-chain variable (V_{H}) region comprising or consisting of the amino acid sequence of SEQ ID NO: 22 of WO 2011/039510 A2.

[0082] In addition, or alternatively thereto, in a preferred embodiment, the anti-CD163 antibody or CD163-binding fragment thereof comprises a light-chain variable (V_{L}) region comprising or consisting of the amino acid sequence of SEQ ID NO: 23 of WO 2011/039510 A2.

[0083] In a further preferred embodiment, the anti-CD163 antibody or CD163-binding fragment thereof comprises a heavy-chain variable (V_{H}) region comprising or consisting of the amino acid sequence of SEQ ID NO: 24 of WO 2011/039510 A2.

[0084] In addition, or alternatively thereto, in a preferred embodiment, the anti-CD163 antibody or CD163-binding fragment thereof comprises a light-chain variable (V_{L}) region comprising or consisting of the amino acid sequence of SEQ ID NO: 25 of WO 2011/039510 A2.

[0085] In the context of the present invention, the anti-CD163 antibody may be a mammalian antibody such as a humanized or human antibody, a non-human primate antibody, a sheep antibody, a pig antibody, a dog antibody or a rodent antibody. In embodiments, the anti-CD163 antibody may monoclonal.

[0086] According to a preference, the anti-CD163 antibody is selected from IgG, IgA, IgD, IgE and IgM.

[0087] According to a further preference, the CD163-binding fragment is selected from a Fab, a Fab′, a F(ab)2, a Fv, a single-chain antibody, a nanobody and an antigen-binding domain.

[0088] CD163 amino acid sequences are for instance disclosed in WO 2011/039510 A2 (which is included here by reference). In the context of the present invention, the anti-CD163 antibody or CD163-binding fragment thereof is preferably specific for a human CD163, especially with the amino acid sequence of any one of SEQ ID NOs: 28-31 of WO 2011/039510 A2.

[0089] In a further preferred embodiment, the anti-CD163 antibody or CD163-binding fragment thereof is specific for the extracellular region of CD163 (e.g. for human CD163: amino acids 42-1050 of UniProt Q86VB7, sequence version 2), preferably for an SRCR domain of CD163, more preferably for any one of SRCR domains 1-9 of CD163 (e.g. for human CD163: amino acids 51-152, 159-259, 266-366, 373-473, 478-578, 583-683, 719-819, 824-926 and 929-1029, respectively, of UniProt Q86VB7, sequence version 2), even more preferably for any one of SRCR domains 1-3 of CD163 (e.g. for human CD163: amino acids 51-152, 159-259, 266-366, and 373-473, respectively, of UniProt Q86VB7, sequence version 2), especially for SRCR domain 1 of CD163 (in particular with the amino acid sequence of any one of SEQ ID NOs: 1-8 of WO 2011/039510 A2, especially SEQ ID NO: 1 of WO 2011/039510 A2).

[0090] In a particular preference, the anti-CD163 antibody or CD163-binding fragment thereof is capable of competing for binding to (preferably human) CD163 with a (preferably human) hemoglobin-haptoglobin complex (e.g. in an ELISA).

[0091] In another particular preference, the anti-CD163 antibody or CD163-binding fragment thereof is capable of competing for binding to human CD163 with any of the anti-human CD163 mAbs disclosed herein, in particular Mac2-48 or Mac2-158 as disclosed in WO 2011/039510 A2.

[0092] In yet another particular preference, the anti-CD163 antibody or CD163-binding fragment thereof is capable of competing for binding to human CD163 with an antibody having a heavy chain variable (VH) region consisting of the amino acid sequence

(SEQ ID NO: 1)
DVQLQESGPGLVKPSQSLSLTCTVTGYSITSDYAWNWIRQFPGNKLEWM
GYITYSGITNYNPSLKSQISITRDTSKNQFFLQLNSVTTEDTATYYCVS
GTYYFDYWGQGTTLTVSS,

[0093] and having a light-chain variable (VL) region consisting of the amino acid sequence

(SEQ ID NO: 2)
SVVMTQTPKSLLISIGDRVTITCKASQSVSSDVAWFQQKPGQSPKPLIY
YASNRYTGVPDRFTGSGYGTDFTFTISSVQAEDLAVYFCGQDYTSPRTF
GGGTKLEIKRA (e.g. in an ELISA).

[0094] Details on competitive binding experiments are known to the person of skilled in the art (e.g. based on ELISA) and are for instance disclosed in WO 2011/039510 A2 (which is included herein by reference).

[0095] In the course of the present invention, the epitopes of antibodies E10B10 and Mac2-158 as disclosed in WO 2011/039510 were mapped by fine mapping using circular peptide arrays, whereby the peptides were derived from CD163. These epitopes are particularly suitable for binding of the anti-CD163 antibody (or CD163-binding fragment thereof) of the inventive compound.

[0096] Accordingly, in particularly preferred embodiment, the anti-CD163 antibody or CD163-binding fragment thereof is specific for peptide consisting of 7-25, preferably 8-20, even more preferably 9-15, especially 10-13 amino acids, wherein the peptide comprises the amino acid sequence CSGRVEVKVQEEWGTVCNNGWSMEA (SEQ ID NO: 3) or a 7-24 amino-acid fragment thereof. Preferably, this peptide comprises the amino acid sequence GRVEVKVQEEW (SEQ ID NO: 4), WGTVCNNGWS (SEQ ID NO: 5) or WGTVCNNGW (SEQ ID NO: 6). More preferably, the peptide comprises an amino acid sequence selected from EWGTVCNNGWSME (SEQ ID NO: 7), QEEWGTVCNNGWS (SEQ ID NO: 8), WGTVCNNGWSMEA (SEQ ID NO: 9), EEWGTVCNNGWSM (SEQ ID NO: 10), VQEEWGTVCNNGW (SEQ ID NO: 11), EWGTVCNNGW (SEQ ID NO: 12) and WGTVCNNGWS (SEQ ID NO: 5). Even more preferably, the peptide consists of an amino acid sequence selected from EWGTVCNNGWSME (SEQ ID NO: 7), QEEWGTVCNNGWS (SEQ ID NO: 8), WGTVCNNGWSMEA (SEQ ID NO: 9), EEWGTVCNNGWSM (SEQ ID NO: 10), VQEEWGTVCNNGW (SEQ ID NO: 11), EWGTVCNNGW (SEQ ID NO: 12) and WGTVCNNGWS (SEQ ID NO: 5), optionally with an N-terminal and/or C-terminal cysteine residue.

[0097] Accordingly, in another particularly preferred embodiment, the anti-CD163 antibody or CD163-binding fragment thereof is specific for a peptide consisting of 7-25, preferably 8-20, even more preferably 9-15, especially 10-13 amino acids, wherein the peptide comprises the amino acid sequence DHVSCRGNESALWDCKHDGWG (SEQ ID NO: 13) or a 7-20 amino-acid fragment thereof. Preferably, this peptide comprises the amino acid sequence ESALW (SEQ ID NO: 14) or ALW. More preferably, the peptide comprises an amino acid sequence selected from ESALWDC (SEQ ID NO: 15), RGNESALWDC (SEQ ID NO: 16), SCRGNESALW (SEQ ID NO: 17), VSCRGNESALWDC (SEQ ID NO: 18), ALWDCKHDGW (SEQ ID NO: 19), DHVSCRGNESALW (SEQ ID NO: 20), CRGNESALWD (SEQ ID NO: 21), NESALWDCKHDGW (SEQ ID NO: 22) and ESALWDCKHDGWG (SEQ ID NO: 23). Even more preferably, the peptide consists of an amino acid sequence selected from ESALWDC (SEQ ID NO: 15), RGNESALWDC (SEQ ID NO: 16), SCRGNESALW (SEQ ID NO: 17), VSCRGNESALWDC (SEQ ID NO: 18), ALWDCKHDGW (SEQ ID NO: 19), DHVSCRGNESALW (SEQ ID NO: 20), CRGNESALWD (SEQ ID NO: 21), NESALWDCKHDGW (SEQ ID NO: 22) and ESALWDCKHDGWG (SEQ ID NO: 23), optionally with an N-terminal and/or C-terminal cysteine residue.

[0098] Accordingly, in another particularly preferred embodiment, the anti-CD163 antibody or CD163-binding fragment thereof is specific for a peptide consisting of 7-25, preferably 8-20, even more preferably 9-15, especially 10-13 amino acids, wherein the peptide comprises the amino acid sequence SSLGGTDKELRLVDGENKCS (SEQ ID NO: 24) or a 7-19 amino-acid fragment thereof. Preferably, this peptide comprises the amino acid sequence SSLGGTDKELR (SEQ ID NO: 25) or SSLGG (SEQ ID NO: 26). More preferably, the peptide comprises an amino acid sequence selected from SSLGGTDKELR (SEQ ID NO: 25), SSLGGTDKEL (SEQ ID NO: 28), SSLGGTDKE (SEQ ID NO: 29), SSLGGTDK (SEQ ID NO: 30), SSLGGTD (SEQ ID NO: 31), SSLGGT (SEQ ID NO: 32) and SSLGG (SEQ ID NO: 26). Even more preferably, the peptide consists of an amino acid sequence selected from SSLGGTDKELR (SEQ ID NO: 25), SSLGGTDKEL (SEQ ID NO: 28), SSLGGTDKE (SEQ ID NO: 29), SSLGGTDK (SEQ ID NO: 30), SSLGGTD (SEQ ID NO: 31), SSLGGT (SEQ ID NO: 32) and SSLGG (SEQ ID NO: 26), optionally with an N-terminal and/or C-terminal cysteine residue.

[0099] The peptides (or peptide n-mers) are preferably covalently conjugated (or covalently bound) to the biopolymer scaffold via a (non-immunogenic) linker known in the art such as for example amine-to-sulfhydryl linkers and bifunctional NHS-PEG-maleimide linkers or other linkers known in the art. Alternatively, the peptides (or peptide n-mers) can be bound to the epitope carrier scaffold e.g. by formation of a disulfide bond between the protein and the peptide (which is also referred to as “linker” herein), or using non-covalent assembly techniques, spontaneous isopeptide bond formation or unnatural amino acids for bio-orthogonal chemistry via genetic code expansion techniques (reviewed by Howarth et al 2018 and Lim et al 2016).

[0100] The compound of the present invention may comprise e.g. at least two, preferably between 3 and 40 copies of one or several different peptides (which may be present in different forms of peptide n-mers as disclosed herein). The compound may comprise one type of epitopic peptide (in other words: antibody-binding peptide or paratope-binding peptide), however the diversity of epitopic peptides bound to one biopolymer scaffold molecule can be a mixture of e.g. up to 8 different epitopic peptides.

[0101] Typically, since the peptides present in the inventive compound specifically bind to selected undesired antibodies, their sequence is usually selected and optimized such that they provide specific binding in order to guarantee selectivity of undesired antibody depletion from the blood. For this purpose, the peptide sequence of the peptides typically corresponds to the entire epitope sequence or portions of the undesired antibody epitope. The peptides used in the present invention can be further optimized by exchanging one, two or up to three amino-acid positions, allowing e.g. for modulating the binding affinity to the undesired antibody that needs to be depleted. Such single or multiple amino-acid substitution strategies that can provide “mimotopes” with increased binding affinity and are known in the field and were previously developed using phage display strategies or peptide microarrays. In other words, the peptides used in the present invention do not have to be completely identical to the native epitope sequences of the undesired antibodies.

[0102] Typically, the peptides used in the compound of the present invention (e.g. peptide P or Pₐ or P_{b} or P₁ or P₂) are composed of one or more of the 20 amino acids commonly present in mammalian proteins. In addition, the amino acid repertoire used in the peptides may be expanded to post-translationally modified amino acids e.g. affecting antigenicity of proteins such as post translational modifications, in particular oxidative post translational modifications (see e.g. Ryan 2014) or modifications to the peptide backbone (see e.g. Müller 2018), or to non-natural amino acids (see e.g. Meister et al, 2018). These modifications may also be used in the peptides e.g. to adapt the binding interaction and specificity between the peptide and the variable region of an undesired antibody. In particular, epitopes (and therefore the peptides used in the compound of the present invention) can also contain citrulline as for example in autoimmune diseases. Furthermore, by introducing modifications into the peptide sequence the propensity of binding to an HLA molecule may be reduced, the stability and the physicochemical characteristics may be improved or the affinity to the undesired antibody may be increased.

[0103] In many cases, the undesired antibody that is to be depleted is oligo- or polyclonal (e.g. autoantibodies, ADAs or alloantibodies are typically poly- or oligoclonal), implying that undesired (polyclonal) antibody epitope covers a larger epitopic region of a target molecule. To adapt to this situation, the compound of the present invention may comprise a mixture of two or several epitopic peptides (in other words: antibody-binding peptides or paratope-binding peptides), thereby allowing to adapt to the polyclonality or oligoclonality of an undesired antibody.

[0104] Such poly-epitopic compounds of the present invention can effectively deplete undesired antibodies and are more often effective than mono-epitopic compounds in case the epitope of the undesired antibody extends to larger amino acid sequence stretches.

[0105] It is advantageous if the peptides used for the inventive compound are designed such that they will be specifically recognized by the variable region of the undesired antibodies to be depleted. The sequences of peptides used in the present invention may e.g. be selected by applying fine epitope mapping techniques (i.e. epitope walks, peptide deletion mapping, amino acid substitution scanning using peptide arrays such as described in Carter et al 2004, and Hansen et al 2013) on the undesired antibodies.

[0106] It is highly preferred that the peptides used for the inventive compound do not bind to any HLA Class I or HLA Class II molecule (i.e. of the individual to be treated, e.g. human), in order to prevent presentation and stimulation via a T-cell receptor in vivo and thereby induce an immune reaction. It is generally not desired to involve any suppressive (or stimulatory) T-cell reaction in contrast to antigen-specific immunologic tolerization approaches. Therefore, to avoid T-cell epitope activity as much as possible, the peptides of the compound of the present invention (e.g. peptide P or Pₐ or P_{b} or P₁ or P₂) preferably fulfil one or more of the following characteristics:
[0107] To reduce the probability for a peptide used in the compound of the present invention to bind to an HLA Class II or Class I molecule, the peptide (e.g. peptide P or Pₐ or P_{b} or P₁ or P₂) has a preferred length of 6-13 amino acids.
[0108] To further reduce the probability that such a peptide binds to an HLA Class II or Class I molecule, it is preferred to test the candidate peptide sequence by HLA binding prediction algorithms such as NetMHCII-2.3 (reviewed by Jensen et al 2018). Preferably, a peptide (e.g. peptide P or Pₐ or P_{b} or P₁ or P₂) used in the compound of the present invention has (predicted) HLA binding (IC50) of at least 500 nM. More preferably, HLA binding (IC50) is more than 1000 nM, especially more than 2000 nM (cf. e.g. Peters et al 2006). In order to decrease the likelihood of HLA Class I binding, NetMHCpan 4.0 may also be applied for prediction (Jurtz et al 2017).
[0109] To further reduce the probability that such a peptide binds to an HLA Class I molecule, the NetMHCpan Rank percentile threshhold can be set to a background level of 10% according to Koçalo\check{g}lu-Yalçin et al, 2018. Preferably, a peptide (e.g. peptide P or Pₐ or P_{b} or P₁ or P₂) used in the compound of the present invention therefore has a % Rank value of more than 3, preferably more than 5, more preferably more than 10 according to the NetMHCpan algorithm.
[0110] To further reduce the probability that such a peptide binds to an HLA Class II molecule, it is beneficial to perform in vitro HLA-binding assays commonly used in the art such as for example refolding assays, iTopia, peptide rescuing assays or array-based peptide binding assays. Alternatively, or in addition thereto, LC-MS based analytics can be used, as e.g. reviewed by Gfeller et al 2016.

[0111] For stronger reduction of the titre of the undesired antibodies, it is preferred that the peptides used in the present invention are circularized (see also Example 4). Accordingly, in a preferred embodiment, at least one occurrence of P is a circularized peptide. Preferably at least 10% of all occurrences of P are circularized peptides, more preferably at least 25% of all occurrences of P are circularized peptides, yet more preferably at least 50% of all occurrences of P are circularized peptides, even more preferably at least 75% of all occurrences of P are circularized peptides, yet even more preferably at least 90% of all occurrences of P are circularized peptides or even at least 95% of all occurrences of P are circularized peptides, especially all of the occurrences of P are circularized peptides. Several common techniques are available for circularization of peptides, see e.g. Ong et al 2017. It goes without saying that “circularized peptide” as used herein shall be understood as the peptide itself being circularized, as e.g. disclosed in Ong et al. (and not e.g. grafted on a circular scaffold with a sequence length that is longer than 13 amino acids). Such peptides may also be referred to as cyclopeptides herein.

[0112] Further, for stronger reduction of the titre of the undesired antibodies relative to the amount of scaffold used, in a preferred embodiment of the compound of the present invention, independently for each of the peptide n-mers, n is at least 2, more preferably at least 3, especially at least 4. Usually, in order to avoid complexities in the manufacturing process, independently for each of the peptide n-mers, n is less than 10, preferably less than 9, more preferably less than 8, even more preferably less than 7, yet even more preferably less than 6, especially less than 5. To benefit from higher avidity through divalent binding of the undesired antibody, it is highly preferred that, for each of the peptide n-mers, n is 2.

[0113] For multivalent binding of the undesired antibodies, it is advantageous that the peptide dimers or n-mers are spaced by a hydrophilic, structurally flexible, immunologically inert, non-toxic and clinically approved spacer such as (hetero-)bifunctional and -trifunctional polyethylene glycol (PEG) spacers (e.g. NHS-PEG-Maleimide)—a wide range of PEG chains is available and PEG is approved by the FDA. Alternatives to PEG linkers such as immunologically inert and non-toxic synthetic polymers or glycans are also suitable. Accordingly, in the context of the present invention, the spacer (e.g. spacer S) is preferably selected from PEG molecules or glycans. For instance, the spacer such as PEG can be introduced during peptide synthesis. Such spacers (e.g. PEG spacers) may have a molecular weight of e.g. 10000 Dalton. Evidently, within the context of the present invention, the covalent binding of the peptide n-mers to the biopolymer scaffold via a linker each may for example also be achieved by binding of the linker directly to a spacer of the peptide n-mer (instead of, e.g., to a peptide of the peptide n-mer).

[0114] Preferably, each of the peptide n-mers is covalently bound to the biopolymer scaffold, preferably via a linker each.

[0115] As used herein, the linker may e.g. be selected from disulphide bridges and PEG molecules.

[0116] According to a further preferred embodiment of the inventive compound, at least one occurrence of P is Pa and/or at least one occurrence of P is P_{b} (wherein Pa and P_{b} each independently is a peptide as defined above for P and/or P₁ and P₂). Preferably, independently for each occurrence, P is Pₐ or P_{b}.

[0117] Furthermore, it is preferred when in the first peptide n-mer, each occurrence of P is Pa and, in the second peptide n-mer, each occurrence of P is P_{b}. Alternatively, or in addition thereto, Pₐ and/or P_{b} is circularized.

[0118] Divalent binding is particularly suitable to reduce antibody titres. According, in a preferred embodiment,
[0119] the first peptide n-mer is Pₐ-S-Pₐ and the second peptide n-mer is Pₐ-S-Pₐ;
[0120] the first peptide n-mer is Pₐ-S-Pₐ and the second peptide n-mer is P_{b}-S-P_{b};
[0121] the first peptide n-mer is P_{b}-S-P_{b} and the second peptide n-mer is P_{b}-S-P_{b};
[0122] the first peptide n-mer is Pₐ-S-P_{b} and the second peptide n-mer is Pₐ-S-P_{b};
[0123] the first peptide n-mer is Pₐ-S-P_{b} and the second peptide n-mer is Pₐ-S-Pₐ; or
[0124] the first peptide n-mer is Pₐ-S-P_{b} and the second peptide n-mer is P_{b}-S-P_{b}.

[0125] For increasing effectivity, in particular in autoimmune disease (which is usually based on polyclonal antibodies, see above), in a preferred embodiment the first peptide n-mer is different from the second peptide n-mer. For similar reasons, preferably, the peptide Pₐ is different from the peptide P_{b}, preferably wherein the peptide Pₐ and the peptide P_{b} are two different epitopes of the same antigen or two different epitope parts of the same epitope.

[0126] Especially for better targeting of polyclonal antibodies, it is advantageous when the peptide Pₐ and the peptide P_{b} comprise the same amino-acid sequence fragment, wherein the amino-acid sequence fragment has a length of at least 2 amino acids, preferably at least 3 amino acids, more preferably at least 4 amino acids, yet more preferably at least 5 amino acids, even more preferably at least 6 amino acids, yet even more preferably at least 7 amino acids, especially at least 8 amino acids or even at least 9 amino acids.

[0127] Further, for stronger reduction of the titre of the undesired antibodies relative to the amount of scaffold used, the compound comprises a plurality of said first peptide n-mer (e.g. up to 10 or 20 or 30) and/or a plurality of said second peptide n-mer (e.g. up to 10 or 20 or 30). For stronger reduction of the titre of the undesired antibodies relative to the amount of scaffold used, the compound may also comprise at least
[0128] a third peptide n-mer of the general formula:

P(-S-P)₍ₙ₋₁₎,
[0129] wherein, independently for each occurrence, P is a peptide defined as disclosed herein above (e.g. for P, P₁, P₂, and/or Pₐ), and S is a non-peptide spacer,
[0130] preferably wherein each occurrence of P is P_{c}, wherein P, is a peptide defined as disclosed herein above (e.g. for P, P₁, P₂, and/or Pₐ),
[0131] more preferably wherein P, is circularized; preferably a fourth peptide n-mer of the general formula:

P(-S-P)₍ₙ₋₁₎,
[0132] wherein, independently for each occurrence, P is a peptide defined as disclosed herein above (e.g. for P, P₁, P₂, and/or Pₐ), and S is a non-peptide spacer,
[0133] preferably wherein each occurrence of P is P_{d}, wherein P_{d} is a peptide defined as disclosed herein above (e.g. for P, P₁, P₂, and/or Pₐ),
[0134] more preferably wherein P_{d} is circularized; preferably a fifth peptide n-mer of the general formula:

P(-S-P)₍ₙ₋₁₎,
[0135] wherein, independently for each occurrence, P is a peptide defined as disclosed herein above (e.g. for P, P₁, P₂, and/or Pₐ), and S is a non-peptide spacer, preferably wherein each occurrence of P is Pₑ, wherein Pₑ is a peptide defined as disclosed herein above (e.g. for P, P₁, P₂, and/or Pₐ),
[0136] more preferably wherein Pₑ is circularized; preferably a sixth peptide n-mer of the general formula:

P(-S-P)₍ₙ₋₁₎,
[0137] wherein, independently for each occurrence, P is a peptide defined as disclosed herein above (e.g. for P, P₁, P₂, and/or Pₐ), and S is a non-peptide spacer,
[0138] preferably wherein each occurrence of P is P_{f}, wherein P_{f} is a peptide defined as disclosed herein above (e.g. for P, P₁, P₂, and/or Pₐ),
[0139] more preferably wherein P_{f} is circularized; preferably a seventh peptide n-mer of the general formula:

P(-S-P)₍ₙ₋₁₎,
[0140] wherein, independently for each occurrence, P is a peptide defined as disclosed herein above (e.g. for P, P₁, P₂, and/or Pₐ), and S is a non-peptide spacer,
[0141] preferably wherein each occurrence of P is P_{g}, wherein P_{g} is a peptide defined as disclosed herein above (e.g. for P, P₁, P₂, and/or Pₐ),
[0142] more preferably wherein P_{g} is circularized; preferably an eight peptide n-mer of the general formula:

P(-S-P)₍ₙ₋₁₎,
[0143] wherein, independently for each occurrence, P is a peptide defined as disclosed herein above (e.g. for P, P₁, P₂, and/or Pₐ), and S is a non-peptide spacer,
[0144] preferably wherein each occurrence of P is Pₕ, wherein Pₕ is a peptide defined as disclosed herein above (e.g. for P, P₁, P₂, and/or Pₐ),
[0145] more preferably wherein Pₕ is circularized; preferably a ninth peptide n-mer of the general formula:

P(-S-P)₍ₙ₋₁₎,
[0146] wherein, independently for each occurrence, P is a peptide defined as disclosed herein above (e.g. for P, P₁, P₂, and/or Pₐ), and S is a non-peptide spacer,
[0147] preferably wherein each occurrence of P is Pᵢ, wherein Pᵢ is a peptide defined as disclosed herein above (e.g. for P, P₁, P₂, and/or Pₐ),
[0148] more preferably wherein Pᵢ is circularized; preferably a tenth peptide n-mer of the general formula:

P(-S-P)₍ₙ₋₁₎,
[0149] wherein, independently for each occurrence, P is a peptide defined as disclosed herein above (e.g. for P, P₁, P₂, and/or Pₐ), and S is a non-peptide spacer,
[0150] preferably wherein each occurrence of P is Pⱼ, wherein Pⱼ is a peptide defined as disclosed herein above (e.g. for P, P₁, P₂, and/or Pₐ),
[0151] more preferably wherein Pⱼ is circularized.

[0152] Peptides P_{c}-Pⱼ may have one or more of same features (e.g. sequence) as disclosed herein for peptides Pₐ and P_{b} (and/or for peptides P, P₁, P₂). All preferred features disclosed herein for P, P₁, and P₂, are also preferred features of the peptides Pₐ-Pⱼ. As also illustrated above, it is highly preferred when the compound of the present invention is non-immunogenic in a mammal, preferably in a human, in a non-human primate, in a sheep, in a pig, in a dog or in a rodent.

[0153] In the context of the present invention, a non-immunogenic compound preferably is a compound wherein the biopolymer scaffold (if it is a protein) and/or the peptides (of the peptide n-mers) have an IC50 higher than 100 nM, preferably higher than 500 nM, even more preferably higher than 1000 nM, especially higher than 2000 nM, against HLA-DRB1_0101 as predicted by the NetMHCII-2.3 algorithm. The NetMHCII-2.3 algorithm is described in detail in Jensen et al, which is incorporated herein by reference. The algorithm is publicly available under http://www.cbs.dtu.dk/services/NetMHCII-2.3/. Even more preferably, a non-immunogenic compound (or pharmaceutical composition) does not bind to any HLA and/or MHC molecule (e.g. in a mammal, preferably in a human, in a non-human primate, in a sheep, in a pig, in a dog or in a rodent; or of the individual to be treated) in vivo.

[0154] According to a further preference, the compound is for intracorporeal sequestration (or intracorporeal depletion) of at least one antibody in an individual, preferably in the bloodstream of the individual and/or for reduction of the titre of at least one antibody in the individual, preferably in the bloodstream of the individual. Preferably the antibody is an antibody specific for a (human) neuroreceptor, preferably a (human) neuroreceptor of the autonomic nervous system, more preferably a (human) neuroreceptor selected from the group consisting of muscarinic, and nicotinic cholinergic receptors, alpha- and beta-adrenergic receptors, serotonin receptors, angiotensin- and endothelin receptors; most preferably a (human) neuroreceptor selected from the group consisting of beta-1 adrenergic receptor, beta-2 adrenergic receptor, M3 muscarinic acetylcholine receptor, and M4 muscarinic acetylcholine receptor; preferably defined by a UniProt accession number disclosed herein above (in the context of the peptides comprised in the inventive compound).

[0155] In an aspect, the present invention relates to a pharmaceutical composition comprising the inventive compound and at least one pharmaceutically acceptable excipient.

[0156] In embodiments, the composition is prepared for intraperitoneal, subcutaneous, intramuscular and/or intravenous administration. In particular, the composition is for repeated administration (since it is typically non-immunogenic).

[0157] In a preference, the molar ratio of peptides (e.g. P or Pₐ or P_{b}) to biopolymer scaffold in the composition is from 2:1 to 100:1, preferably from 3:1 to 90:1, more preferably from 4:1 to 80:1, even more preferably from 5:1 to 70:1, yet even more preferably from 6:1 to 60:1, especially from 7:1 to 50:1 or even from 8:10 to 40:1.

[0158] In another aspect, the compound and/or the pharmaceutical composition of the present invention is for use in therapy.

[0159] Preferably, the compound and/or the pharmaceutical composition is for use in prevention or treatment of ME/CFS in an individual.

[0160] In a further preference, the compound and/or the pharmaceutical composition is for use in prevention or treatment of POTS in an individual.

[0161] In yet a further preference, the compound and/or the pharmaceutical composition is for use in prevention or treatment of AAG in an individual.

[0162] In yet a further preference, the compound and/or the pharmaceutical composition is for use in prevention or treatment of IDC in an individual.

[0163] In yet a further preference, the compound and/or the pharmaceutical composition is for use in prevention or treatment of cChHD in an individual.

[0164] In yet a further preference, the compound and/or the pharmaceutical composition is for use in prevention or treatment of encephalitis such as limbic encephalitis or paraneoplastic striatal encephalitis or Anti-mGluR1 encephalitis or Anti-mGluR5 encephalitis or acute disseminated encephalomyelitis (ADEM) or NMDAR encephalitis, paraneoplastic syndrome, stiff man syndrome, autoimmune channelopathies, neuromyelitis optica, neuromyotonia, Morvan's syndrome, neuropathic pain, myelitis, optic neuritis, retinitis, parkinsonism, chorea, psychosis, dystonia, mutism, movement disorders, confusion, hallucinations, prodromal diarrhoea, memory loss, hyperexcitability, encephalitis psychiatric syndrome, narcolepsy, autism spectrum disorders, seizures, status epilepticus, chronic epilepsy, myoclonus, encephalomyelitis, myoclonus, parasomnia, sleep apnoea, cognitive impairment, gait abnormalities, faciobrachial dystonic seizures, paraneoplastic syndrome, cerebellar ataxia, dysautonomia, Tourette, ADHD, cerebellar ataxia, oscillopsia, amyotrophic lateral sclerosis (ALS), thyroid disorder and headache with neurological deficits or lymphocytosis (HaNDL) in an individual.

[0165] In the course of the present invention, it turned out that the in vivo kinetics of undesirable-antibody lowering by the inventive compound is typically very fast, sometimes followed by a mild rebound of the undesirable antibody. It is thus particularly preferred when the compound (or the pharmaceutical composition comprising the compound) is administered at least twice within a 96-hour window, preferably within a 72-hour window, more preferably within a 48-hour window, even more preferably within a 36-hour window, yet even more preferably within a 24-hour window, especially within a 18-hour window or even within a 12-hour window.

[0166] In embodiments, one or more antibodies are present in the individual which are specific for at least one occurrence of the peptide of the inventive compound (e.g. the peptide P, P₁, P₂, or for peptide Pₐ and/or peptide P_{b}), preferably wherein said antibodies are specific for a neuroreceptor as defined herein above.

[0167] It is highly preferred that the composition is non-immunogenic in the individual (e.g. it does not comprise an adjuvant or an immunostimulatory substance that stimulates the innate or the adaptive immune system, e.g. such as an adjuvant or a T-cell epitope).

[0168] The composition of the present invention may be administered at a dose of 1-1000 mg, preferably 2-500 mg, more preferably 3-250 mg, even more preferably 4-100 mg, especially 5-50 mg, compound per kg body weight of the individual, preferably wherein the composition is administered repeatedly. Such administration may be intraperitoneally, subcutaneously, intramuscularly or intravenously.

[0169] In an aspect, the present invention relates to a method of ameliorating or treating an autoantibody-mediated condition, preferably selected from CFS/ME, POTS, AAG, IDC, and cChHD and encephalitis such as limbic encephalitis or paraneoplastic striatal encephalitis or Anti-mGluR1 encephalitis or Anti-mGluR5 encephalitis or acute disseminated encephalomyelitis (ADEM) or NMDAR encephalitis, paraneoplastic syndrome, stiff man syndrome, autoimmune channelopathies, neuromyelitis optica, neuromyotonia, Morvan's syndrome, neuropathic pain, myelitis, optic neuritis, retinitis, parkinsonism, chorea, psychosis, dystonia, mutism, movement disorders, confusion, hallucinations, prodromal diarrhoea, memory loss, hyperexcitability, encephalitis psychiatric syndrome, narcolepsy, autism spectrum disorders, seizures, status epilepticus, chronic epilepsy, myoclonus, encephalomyelitis, myoclonus, parasomnia, sleep apnoea, cognitive impairment, gait abnormalities, faciobrachial dystonic seizures, paraneoplastic syndrome, cerebellar ataxia, dysautonomia, Tourette, ADHD, cerebellar ataxia, oscillopsia, amyotrophic lateral sclerosis (ALS), thyroid disorder and headache with neurological deficits and lymphocytosis (HaNDL), in an individual in need thereof, comprising
[0170] obtaining the inventive pharmaceutical composition; and
[0171] administering an effective amount of the pharmaceutical composition to the individual. All preferred features disclosed for the compound and/or the pharmaceutical composition for use in prevention or treatment of an autoantibody-mediated condition, selected from CFS/ME, POTS, AAG, IDC, and cChHD and other conditions disclosed herein, in an individual also apply to this method.

[0172] In a further aspect, the present invention relates to a method of sequestering (or depleting) one or more antibodies present in an individual, comprising
[0173] obtaining a pharmaceutical composition as defined herein, wherein the composition is non-immunogenic in the individual and wherein the one or more antibodies present in the individual are specific for at least one occurrence of P, or for peptide Pₐ and/or peptide P_{b}; and
[0174] administering (in particular repeatedly administering, e.g. at least two times, preferably at least three times, more preferably at least five times) the pharmaceutical composition to the individual.

[0175] In a preference, the one or more antibodies are specific for a neuroreceptor, preferably a neuroreceptor as defined herein above.

[0176] Preferably, the biopolymer scaffold is autologous with respect to the individual, preferably wherein the biopolymer scaffold is an autologous protein (i.e. murine albumin is used when the individual is a mouse).

[0177] In a further aspect, the present invention relates to a peptide, wherein the peptide is defined as disclosed herein for any one of the at least two peptides of the inventive compound, P, P₁, P₂, Pₐ, or P_{b}. Preferably, the peptide comprises a 6-amino-acid fragment, preferably a 7-, more preferably an 8-, even more preferably a 9-, even more preferably a 10-, even more preferably an 11-, yet even more preferably a 12-, most preferably a 13-amino-acid fragment, of an amino-acid sequence, identified by a UniProt accession code selected from the group consisting of: P02708, P07510, P07550, P08172, P08173, P08588, P08908, P08912, P08913, P11229, P11230, P13945, P17787, P18089, P18825, P20309, P25098, P25100, P30532, P30926, P32297, P35348, P35368, P35626, P36544, P43681, Q04844, Q05901, Q07001, Q15822, Q15825, Q9GZZ6, Q9UGM1, A0A0G2JKS1, A5X5Y0, A6NL88, A8MPY1, B4DS77, B8ZZ34, 000222, 000591, 014490, 014764, 015303, 015399, 043424, 043653, 060359, 060391, 060403, 060404, 060936, 075311, 075916, 076027, 094772, 095264, 095502, 095868, 095886, P01579, P05026, P05067, P06850, P07196, P07384, POC7T3, POC8F1, PODP57, PODP58, P12931, P13500, P14416, P14867, P15382, P16066, P17342, P18505, P18507, P19634, P20594, P21452, P21728, P21917, P21918, P23415, P23416, P24046, P24387, P25021, P25101, P28221, P28222, P28223, P28335, P28472, P28476, P28566, P29274, P29275, P29323, P30411, P30542, P30556, P30939, P31644, P32418, P34903, P34969, P35367, P35372, P35462, P35609, P37288, P39086, P41594, P41595, P41597, P42261, P42262, P42263, P43119, P46098, P47869, P47870, P47898, P47901, P47972, P48058, P48067, P48167, P48169, P48549, P49354, P50052, P50406, P53355, P55000, P62955, P63252, P78334, P78352, P78509, Q00535, Q05586, Q06413, Q07699, Q12879, Q12959, Q13002, Q13003, Q13224, Q13255, Q13387, Q13639, Q13702, Q13936, Q13972, Q14289, Q14416, Q14500, Q14571, Q14573, Q14643, Q14831, Q14832, Q14833, Q14957, Q15700, Q15818, Q16099, Q16445, Q16478, Q16553, Q16602, Q401N2, Q494W8, Q5SQ64, Q6PI25, Q6TFL4, Q6UXU4, Q6ZSJ9, Q70Z44, Q86Y78, Q86YM7, Q8N1C3, Q8N2G4, Q8N2Q7, Q8N4C8, Q8NC67, Q8NFZ4, Q8NG75, Q8NGA5, Q8NGA6, Q8NGC8, Q8NGC9, Q8NGG2, Q8NGG3, Q8NGH5, Q8NGH8, Q8NGN1, Q8NGS4, Q8NGY7, Q8NHC4, Q8NI32, Q8TBE1, Q8TCU5, Q8TDF5, Q8WXA2, Q8WXA8, Q8WXS5, Q92736, Q92796, Q96G91, Q96NW7, Q96P66, Q99928, Q99996, Q9BUH8, Q9BXM7, Q9BYB0, Q9GZV3, Q9H3N8, Q9NPA1, Q9NZ94, Q9P1A6, Q9UBK2, Q9UBN1, Q9UBS5, Q9UF02, Q9ULKO, Q9UN88, Q9UPX8, Q9Y2H0, Q9Y4A9, Q9Y566, Q9Y5N1, Q9Y691, Q9Y698, P37088, P51168, P51170, P51172, 094759, Q16515, 060741, Q9NZQ8, P78348, Q8TDD5, Q9NY37, Q13002, P39086, P48664, A6NGN9, 000305, 000555, 015146, 043448, 043497, 043525, 043526, 060840, 075096, 095180, 095259, 095970, P06213, P16389, P16473, P17658, P22001, P22459, P22460, P24530, P42658, P43146, P48547, P49418, P51787, P54284, P54289, P56696, Q00975, Q01668, Q02246, Q02641, Q03721, Q05329, Q06432, Q08289, Q09470, Q12809, Q13018, Q13303, Q13698, Q14003, Q14721, Q14722, Q15878, Q6PIL6, Q6PIU1, Q6X4W1, Q7Z3S7, Q7Z429, Q8IZS8, Q8NCM2, Q8TAE7, Q8TDN1, Q8TDN2, Q8WWG9, Q92953, Q96KK3, Q96L42, Q96PR1, Q96RP8, Q9BQ31, Q9BXT2, Q9H252, Q9H3M0, Q9NR82, Q9NS40, Q9NS61, Q9NSA2, Q9NY47, Q9NZI2, Q9NZV8, Q9POX4, Q9UHC6, Q9UIX4, Q9UJ90, Q9UJ96, Q9UK17, Q9ULD8, Q9ULS6, Q9UQ05, Q9Y2W7, Q9Y6H6, Q9Y6J6, P48058, P55087, Q9BPU6, P52799, P15328, Q05329, Q16653, Q9Y4C0, Q5F0I5, Q99719, P17600, Q13148, P01266, Q9Y6A1, Q9Y6A1, and P07202, optionally wherein at most three, preferably at most two, more preferably at most one amino acid is independently substituted by any other amino acid. Even more preferably, said amino-acid fragment comprises at least 4, preferably at least 5 or even at least 6, more preferably at least 7 or even at least 8, yet more preferably at least 9, even more preferably at least 10, yet even more preferably at least 11, especially at least 12 or even 13 consecutive amino acids of a sequence identified by any one of SEQ ID NOs: 45-3536 (with the proviso that the UniProt accession code of said amino-acid sequence and the UniProt accession code of the SEQ ID NO given in Table 1 is the same), preferably any one of SEQ ID NOs: 45-863 (with the proviso that the UniProt accession code of said amino-acid sequence and the UniProt accession code of the SEQ ID NO given in Table 1 is the same), especially any one of SEQ ID NOs: 45-201 (with the proviso that the UniProt accession code of said amino-acid sequence and the UniProt accession code of the SEQ ID NO given in Table 1 is the same), optionally wherein at most three, preferably at most two, more preferably at most one amino acid is independently substituted by any other amino acid.

[0178] In certain embodiments, such peptides may be used as probes for the diagnostic typing and analysis of autoantibody-mediated conditions such as disclosed herein. The peptides can e.g. be used as part of a diagnostic autoantibody-mediated condition typing or screening device or kit or procedure, as a companion diagnostic, for patient stratification or for monitoring autoantibody levels in the course of therapeutic treatments.

[0179] In a further aspect, the invention relates to a method for detecting and/or quantifying autoantibodies in a biological sample comprising the steps of
[0180] bringing the sample into contact with the peptide defined as disclosed herein (e.g. for P, P₁, P₂, Pₐ, or P_{b}), and
[0181] detecting the presence and/or concentration of autoantibodies in the sample.

[0182] The skilled person is familiar with methods for detecting and/or quantifying antibodies in biological samples. The method can e.g. be a sandwich assay, preferably an enzyme-linked immunosorbent assay (ELISA), or a surface plasmon resonance (SPR) assay.

[0183] In a preference, the peptide (especially at least 10, more preferably at least 100, even more preferably at least 1000, especially at least 10000 different peptides of the invention) are immobilized on a solid support, preferably an ELISA plate or an SPR chip or a biosensor-based diagnostic device with an electrochemical, fluorescent, magnetic, electronic, gravimetric or optical biotransducer. Alternatively, or in addition thereto, the peptide (especially at least 10, more preferably at least 100, even more preferably at least 1000, especially at least 10000 different peptides of the invention) may be coupled to a reporter or reporter fragment, such as a reporter fragment suitable for a protein-fragment complementation assay (PCA); see e.g. Li et al, 2019, or Kanulainen et al, 2021.

[0184] Preferably, the sample is obtained from a mammal, preferably a human. Preferably the sample is a blood sample, preferably a whole blood, serum, or plasma sample.

[0185] The invention further relates to the use of a peptide defined as disclosed herein (e.g. for P, P₁, P₂, Pₐ, or P_{b}) in a diagnostic assay, preferably ELISA, preferably as disclosed herein above.

[0186] A further aspect of the invention relates to a diagnostic device comprising the peptide defined as disclosed herein (e.g. for P, P₁, P₂, Pₐ, or P_{b}), preferably immobilized on a solid support. In a preference, the solid support is an ELISA plate or a surface plasmon resonance chip. In another preference, the diagnostic device is a biosensor-based diagnostic device with an electrochemical, fluorescent, magnetic, electronic, gravimetric or optical biotransducer.

[0187] In another preferred embodiment, the diagnostic device is a lateral flow assay.

[0188] The invention further relates to a diagnostic kit comprising a peptide defined as disclosed herein (e.g. for P, P₁, P₂, Pₐ, or P_{b}), preferably a diagnostic device as defined herein. Preferably the diagnostic kit further comprises one or more selected from the group of a buffer, a reagent, instructions. Preferably the diagnostic kit is an ELISA kit.

[0189] A further aspect relates to an apheresis device comprising the peptide defined as disclosed herein (e.g. for P, P₁, P₂, Pₐ, or P_{b}). Preferably the peptide is immobilized on a solid carrier. It is especially preferred if the apheresis device comprises at least two, preferably at least three, more preferably at least four different peptides defined as disclosed herein (e.g. for P, P₁, P₂, Pₐ, or P_{b}). In a preferred embodiment the solid carrier comprises the inventive compound.

[0190] Preferably, the solid carrier is capable of being contacted with blood or plasma flow. Preferably, the solid carrier is a sterile and pyrogen-free column.

[0191] In the context of the present invention, for improved bioavailability, it is preferred that the inventive compound has a solubility in water at 25° C. of at least 0.1 μg/ml, preferably at least 1 μg/ml, more preferably at least 10 μg/ml, even more preferably at least 100 μg/ml, especially at least 1000 μg/ml.

[0192] The term “preventing” or “prevention” as used herein means to stop a disease state or condition from occurring in a patient or subject completely or almost completely or at least to a (preferably significant) extent, especially when the patient or subject or individual is predisposed to such a risk of contracting a disease state or condition.

[0193] The pharmaceutical composition of the present invention is preferably provided as a (typically aqueous) solution, (typically aqueous) suspension or (typically aqueous) emulsion. Excipients suitable for the pharmaceutical composition of the present invention are known to the person skilled in the art, upon having read the present specification, for example water (especially water for injection), saline, Ringer's solution, dextrose solution, buffers, Hank solution, vesicle forming compounds (e.g. lipids), fixed oils, ethyl oleate, 5% dextrose in saline, substances that enhance isotonicity and chemical stability, buffers and preservatives. Other suitable excipients include any compound that does not itself induce the production of antibodies in the patient (or individual) that are harmful for the patient (or individual). Examples are well tolerable proteins, polysaccharides, polylactic acids, polyglycolic acid, polymeric amino acids and amino acid copolymers. This pharmaceutical composition can (as a drug) be administered via appropriate procedures known to the skilled person (upon having read the present specification) to a patient or individual in need thereof (i.e. a patient or individual having or having the risk of developing the diseases or conditions mentioned herein). The preferred route of administration of said pharmaceutical composition is parenteral administration, in particular through intraperitoneal, subcutaneous, intramuscular and/or intravenous administration. For parenteral administration, the pharmaceutical composition of the present invention is preferably provided in injectable dosage unit form, e.g. as a solution (typically as an aqueous solution), suspension or emulsion, formulated in conjunction with the above-defined pharmaceutically acceptable excipients. The dosage and method of administration, however, depends on the individual patient or individual to be treated. Said pharmaceutical composition can be administered in any suitable dosage known from other biological dosage regimens or specifically evaluated and optimised for a given individual. For example, the active agent may be present in the pharmaceutical composition in an amount from 1 mg to 10 g, preferably 50 mg to 2 g, in particular 100 mg to 1 g. Usual dosages can also be determined on the basis of kg body weight of the patient, for example preferred dosages are in the range of 0.1 mg to 100 mg/kg body weight, especially 1 to 10 mg/kg body weight (per administration session). The administration may occur e.g. once daily, once every other day, once per week or once every two weeks. As the preferred mode of administration of the inventive pharmaceutical composition is parenteral administration, the pharmaceutical composition according to the present invention is preferably liquid or ready to be dissolved in liquid such sterile, de-ionised or distilled water or sterile isotonic phosphate-buffered saline (PBS). Preferably, 1000 μg (dry-weight) of such a composition comprises or consists of 0.1-990 μg, preferably 1-900 μg, more preferably 10-200 μg compound, and option-ally 1-500 μg, preferably 1-100 μg, more preferably 5-15 μg (buffer) salts (preferably to yield an isotonic buffer in the final volume), and optionally 0.1-999.9 μg, preferably 100-999.9 μg, more preferably 200-999 μg other excipients. Preferably, 100 mg of such a dry composition is dissolved in sterile, de-ionised/distilled water or sterile isotonic phosphate-buffered saline (PBS) to yield a final volume of 0.1-100 ml, preferably 0.5-20 ml, more preferably 1-10 ml.

[0194] It is evident to the skilled person that active agents and drugs described herein can also be administered in salt-form (i.e. as a pharmaceutically acceptable salt of the active agent). Accordingly, any mention of an active agent herein shall also include any pharmaceutically acceptable salt forms thereof.

[0195] Methods for chemical synthesis of peptides used for the compound of the present invention are well-known in the art. Of course, it is also possible to produce the peptides using recombinant methods. The peptides can be produced in microorganisms such as bacteria, yeast or fungi, in eukaryotic cells such as mammalian or insect cells, or in a recombinant virus vector such as adenovirus, poxvirus, herpesvirus, Simliki forest virus, baculovirus, bacteriophage, sindbis virus or sendai virus. Suitable bacteria for producing the peptides include E. coli, B. subtilis or any other bacterium that is capable of expressing such peptides. Suitable yeast cells for expressing the peptides of the present invention include Saccharomyces cerevisiae, Schizosaccharomyces pombe, Candida, Pichiapastoris or any other yeast capable of expressing peptides. Corresponding means and methods are well known in the art. Also, methods for isolating and purifying recombinantly produced peptides are well known in the art and include e.g. gel filtration, affinity chromatography, ion exchange chromatography etc.

[0196] Beneficially, cysteine residues are added to the peptides at the N- and/or C-terminus to facilitate coupling to the biopolymer scaffold, especially.

[0197] To facilitate isolation of said peptides, fusion polypeptides may be made wherein the peptides are translationally fused (covalently linked) to a heterologous polypeptide which enables isolation by affinity chromatography. Typical heterologous polypeptides are His-Tag (e.g. His6; 6 histidine residues), GST-Tag (Glutathione-S-transferase) etc. The fusion polypeptide facilitates not only the purification of the peptides but can also prevent the degradation of the peptides during the purification steps. If it is desired to remove the heterologous polypeptide after purification, the fusion polypeptide may comprise a cleavage site at the junction between the peptide and the heterologous polypeptide. The cleavage site may consist of an amino acid sequence that is cleaved with an enzyme specific for the amino acid sequence at the site (e.g. proteases).

[0198] The coupling/conjugation chemistry used to link the peptides/peptide n-mers to the biopolymer scaffold (e.g. via heterobifunctional compounds such as GMBS and of course also others as described in “Bioconjugate Techniques”, Greg T. Hermanson) or used to conjugate the spacer to the peptides in the context of the present invention can also be selected from reactions known to the skilled in the art. The biopolymer scaffold itself may be recombinantly produced or obtained from natural sources.

[0199] Herein, the term “specific for”—as in “molecule A specific for molecule B”—means that molecule A has a binding preference for molecule B compared to other molecules in an individual's body. Typically, this entails that molecule A (such as an antibody) has a dissociation constant (also called “affinity”) in regard to molecule B (such as the antigen, specifically the binding epitope thereof) that is lower than (i.e. “stronger than”) 1000 nM, preferably lower than 100 nM, more preferably lower than 50 nM, even more preferably lower than 10 nM, especially lower than 5 nM.

[0200] Herein, “UniProt” refers to the Universal Protein Resource. UniProt is a comprehensive resource for protein sequence and annotation data. UniProt is a collaboration between the European Bioinformatics Institute (EMBL-EBI), the SIB Swiss Institute of Bioinformatics and the Protein Information Resource (PIR). Across the three institutes more than 100 people are involved through different tasks such as database curation, software development and support. Website: https://www.uniprot.org/

[0201] Entries in the UniProt databases are identified by their accession codes (referred to herein e.g. as “UniProt accession code” or briefly as “UniProt” followed by the accession code), usually a code of six alphanumeric letters (e.g. “Q1HVF7”). If not specified otherwise, the accession codes used herein refer to entries in the Protein Knowledgebase (UniProtKB) of UniProt. If not stated otherwise, the UniProt database state for all entries referenced herein is of 22 Sep. 2020 (UniProt/UniProtKB Release 2020_04).

[0202] In the context of the present application, sequence variants (designated as “natural variant” in UniProt) are expressly included when referring to a UniProt database entry.

[0203] “Percent (%) amino acid sequence identity” or “X % identical” (such as “70% identical”) with respect to a reference polypeptide or protein sequence is defined as the percentage of amino acid residues in a candidate sequence that are identical with the amino acid residues in the reference polypeptide sequence, after aligning the sequences and introducing gaps, if necessary, to achieve the maximum percent sequence identity, and not considering any conservative substitutions as part of the sequence identity. Alignment for purposes of determining percent amino acid sequence identity can be achieved in various ways that are within the skill in the art, for instance, using publicly available computer software such as BLAST, BLAST-2, ALIGN, ALIGN-2, Megalign (DNASTAR) or the “needle” pairwise sequence alignment application of the EMBOSS software package. Those skilled in the art can determine appropriate parameters for aligning sequences, including any algorithms needed to achieve maximal alignment over the full length of the sequences being compared. For purposes herein, however, % amino acid sequence identity values are calculated using the sequence alignment of the computer programme “needle” of the EMBOSS software package (publicly available from European Molecular Biology Laboratory; Rice et al., 2000).

[0204] The needle programme can be accessed under the web site http://www.ebi.ac.uk/Tools/psa/emboss_needle/ or downloaded for local installation as part of the EMBOSS package from http://emboss.sourceforge.net/. It runs on many widely-used UNIX operating systems, such as Linux.

[0205] To align two protein sequences, the needle programme is preferably run with the following parameters:

[0206] Commandline: needle-auto-stdout-asequence SEQUENCE_FILE_A-bsequence SEQUENCE_FILE_B-datafile EBLOSUM62-gapopen 10.0-gapextend 0.5-endopen 10.0-endextend 0.5-aformat3 pair-sprotein1-sprotein2 (Align_format: pair Report_file: stdout)

[0207] The % amino acid sequence identity of a given amino acid sequence A to, with, or against a given amino acid sequence B (which can alternatively be phrased as a given amino acid sequence A that has or comprises a certain % amino acid sequence identity to, with, or against a given amino acid sequence B) is calculated as follows:

100 times the fraction X/Y
[0208] where X is the number of amino acid residues scored as identical matches by the sequence alignment program needle in that program's alignment of A and B, and where Y is the total number of amino acid residues in B. It will be appreciated that where the length of amino acid sequence A is not equal to the length of amino acid sequence B, the % amino acid sequence identity of A to B will not equal the % amino acid sequence identity of B to A. In cases where “the sequence of A is more than N % identical to the entire sequence of B”, Y is the entire sequence length of B (i.e. the entire number of amino acid residues in B). Unless specifically stated otherwise, all % amino acid sequence identity values used herein are obtained as described in the immediately preceding paragraph using the needle computer program.

[0209] The present invention further relates to the following embodiments:

[0210] Embodiment 1. A compound comprising a biopolymer scaffold and at least two peptides with a sequence length of 6-13 amino acids,
[0211] wherein each of the peptides independently comprises a 6-amino-acid fragment, preferably a 7-, more preferably an 8-, even more preferably a 9-, even more preferably a 10-, even more preferably an 11-, yet even more preferably a 12-, most preferably a 13-amino-acid fragment, of an amino-acid sequence, preferably of a (preferably human) neuroreceptor, identified by a UniProt accession code selected from the group consisting of:
[0212] P02708, P07510, P07550, P08172, P08173, P08588, P08908, P08912, P08913, P11229, P11230, P13945, P17787, P18089, P18825, P20309, P25098, P25100, P30532, P30926, P32297, P35348, P35368, P35626, P36544, P43681, Q04844, Q05901, Q07001, Q15822, Q15825, Q9GZZ6, Q9UGM1, A0A0G2JKS1, A5X5Y0, A6NL88, A8MPY1, B4DS77, B8ZZ34, O00222, O00591, O14490, O14764, O15303, O15399, O43424, O43653, O60359, O60391, O60403, O60404, O60936, O75311, O75916, O76027, O94772, O95264, O95502, O95868, O95886, P01579, P05026, P05067, P06850, P07196, P07384, POC7T3, POC8F1, PODP57, PODP58, P12931, P13500, P14416, P14867, P15382, P16066, P17342, P18505, P18507, P19634, P20594, P21452, P21728, P21917, P21918, P23415, P23416, P24046, P24387, P25021, P25101, P28221, P28222, P28223, P28335, P28472, P28476, P28566, P29274, P29275, P29323, P30411, P30542, P30556, P30939, P31644, P32418, P34903, P34969, P35367, P35372, P35462, P35609, P37288, P39086, P41594, P41595, P41597, P42261, P42262, P42263, P43119, P46098, P47869, P47870, P47898, P47901, P47972, P48058, P48067, P48167, P48169, P48549, P49354, P50052, P50406, P53355, P55000, P62955, P63252, P78334, P78352, P78509, Q00535, Q05586, Q06413, Q07699, Q12879, Q12959, Q13002, Q13003, Q13224, Q13255, Q13387, Q13639, Q13702, Q13936, Q13972, Q14289, Q14416, Q14500, Q14571, Q14573, Q14643, Q14831, Q14832, Q14833, Q14957, Q15700, Q15818, Q16099, Q16445, Q16478, Q16553, Q16602, Q401N2, Q494W8, Q5SQ64, Q6PI25, Q6TFL4, Q6UXU4, Q6ZSJ9, Q70Z44, Q86Y78, Q86YM7, Q8N1C3, Q8N2G4, Q8N2Q7, Q8N4C8, Q8NC67, Q8NFZ4, Q8NG75, Q8NGA5, Q8NGA6, Q8NGC8, Q8NGC9, Q8NGG2, Q8NGG3, Q8NGH5, Q8NGH8, Q8NGN1, Q8NGS4, Q8NGY7, Q8NHC4, Q8NI32, Q8TBE1, Q8TCU5, Q8TDF5, Q8WXA2, Q8WXA8, Q8WXS5, Q92736, Q92796, Q96G91, Q96NW7, Q96P66, Q99928, Q99996, Q9BUH8, Q9BXM7, Q9BYB0, Q9GZV3, Q9H3N8, Q9NPA1, Q9NZ94, Q9P1A6, Q9UBK2, Q9UBN1, Q9UBS5, Q9UF02, Q9ULKO, Q9UN88, Q9UPX8, Q9Y2H0, Q9Y4A9, Q9Y566, Q9Y5N1, Q9Y691, Q9Y698, P37088, P51168, P51170, P51172, O94759, Q16515, O60741, Q9NZQ8, P78348, Q8TDD5, Q9NY37, Q13002, P39086, P48664, A6NGN9, O00305, O00555, O15146, O43448, O43497, O43525, O43526, O60840, O75096, O95180, O95259, O95970, P06213, P16389, P16473, P17658, P22001, P22459, P22460, P24530, P42658, P43146, P48547, P49418, P51787, P54284, P54289, P56696, Q00975, Q01668, Q02246, Q02641, Q03721, Q05329, Q06432, Q08289, Q09470, Q12809, Q13018, Q13303, Q13698, Q14003, Q14721, Q14722, Q15878, Q6PIL6, Q6PIU1, Q6X4W1, Q7Z3S7, Q7Z429, Q8IZS8, Q8NCM2, Q8TAE7, Q8TDN1, Q8TDN2, Q8WWG9, Q92953, Q96KK3, Q96L42, Q96PR1, Q96RP8, Q9BQ31, Q9BXT2, Q9H252, Q9H3M0, Q9NR82, Q9NS40, Q9NS61, Q9NSA2, Q9NY47, Q9NZI2, Q9NZV8, Q9POX4, Q9UHC6, Q9UIX4, Q9UJ90, Q9UJ96, Q9UK17, Q9ULD8, Q9ULS6, Q9UQ05, Q9Y2W7, Q9Y6H6, Q9Y6J6, P48058, P55087, Q9BPU6, P52799, P15328, Q05329, Q16653, Q9Y4C0, Q5F0I5, Q99719, P17600, Q13148, P01266, P07202, and Q9Y6A1, (preferably identified by an UniProt accession code selected from Table 1, Table 2 or Table 3 below, in particular Table 1 or Table 3),
[0213] optionally wherein at most three, preferably at most two, more preferably at most one amino acid is independently substituted by any other amino acid.

[0214] Embodiment 2. The compound of embodiment 1, wherein said amino-acid sequence is an amino acid sequence, preferably of a (preferably human) neuroreceptor of the autonomic nervous system, identified by a UniProt accession code selected from the group consisting of: P02708, P07510, P07550, P08172, P08173, P08588, P08908, P08912, P08913, P11229, P11230, P13945, P17787, P18089, P18825, P20309, P25098, P25100, P30532, P30926, P32297, P35348, P35368, P35626, P36544, P43681, Q04844, Q05901, Q07001, Q15822, Q15825, Q9GZZ6, Q9UGM1; P37088, P51168, P51170, P51172, O94759, Q16515, 060741, Q9NZQ8, P78348, Q8TDD5, Q9NY37, Q13002, P39086, and P48664.

[0215] Embodiment 3. The compound of embodiment 1 or 2, wherein said amino acid sequence is an amino acid sequence of a (preferably human) neuroreceptor selected from the group consisting of muscarinic, and nicotinic cholinergic receptors, alpha- and beta-adrenergic receptors, serotonin receptors, angiotensin- and endothelin receptors.

[0216] Embodiment 4. The compound of any one of embodiments 1 to 3, wherein said amino-acid sequence is an amino acid sequence, preferably of a (preferably human) neuroreceptor selected from the group consisting of beta-1 adrenergic receptor, beta-2 adrenergic receptor, M3 muscarinic acetylcholine receptor, and M4 muscarinic acetylcholine receptor, identified by a UniProt accession code selected from the group consisting of: P08588, P07550, P20309, and P08173.

[0217] Embodiment 5. The compound of any one of embodiments 1 to 4, wherein said amino-acid sequence is an amino acid sequence identified by a UniProt accession code selected from the group consisting of: P02708, P07510, P07550, P08172, P08173, P08588, P08908, P08912, P08913, P11229, P11230, P13945, P17787, P18089, P18825, P20309, P25098, P25100, P30532, P30926, P32297, P35348, P35368, P35626, P36544, P43681, Q04844, Q05901, Q07001, Q15822, Q15825, Q9GZZ6, Q9UGM1, A0A0G2JKS1, A5X5Y0, A6NL88, A8MPY1, B4DS77, B8ZZ34, O00222, O00591, O14490, O14764, O15303, O15399, O43424, O43653, O60359, O60391, O60403, O60404, O60936, O75311, O75916, O76027, O94772, O95264, O95502, O95868, O95886, P01579, P05026, P05067, P06850, P07196, P07384, POC7T3, POC8F1, PODP57, PODP58, P12931, P13500, P14416, P14867, P15382, P16066, P17342, P18505, P18507, P19634, P20594, P21452, P21728, P21917, P21918, P23415, P23416, P24046, P24387, P25021, P25101, P28221, P28222, P28223, P28335, P28472, P28476, P28566, P29274, P29275, P29323, P30411, P30542, P30556, P30939, P31644, P32418, P34903, P34969, P35367, P35372, P35462, P35609, P37288, P39086, P41594, P41595, P41597, P42261, P42262, P42263, P43119, P46098, P47869, P47870, P47898, P47901, P47972, P48058, P48067, P48167, P48169, P48549, P49354, P50052, P50406, P53355, P55000, P62955, P63252, P78334, P78352, P78509, Q00535, Q05586, Q06413, Q07699, Q12879, Q12959, Q13002, Q13003, Q13224, Q13255, Q13387, Q13639, Q13702, Q13936, Q13972, Q14289, Q14416, Q14500, Q14571, Q14573, Q14643, Q14831, Q14832, Q14833, Q14957, Q15700, Q15818, Q16099, Q16445, Q16478, Q16553, Q16602, Q401N2, Q494W8, Q5SQ64, Q6PI25, Q6TFL4, Q6UXU4, Q6ZSJ9, Q70Z44, Q86Y78, Q86YM7, Q8N1C3, Q8N2G4, Q8N2Q7, Q8N4C8, Q8NC67, Q8NFZ4, Q8NG75, Q8NGA5, Q8NGA6, Q8NGC8, Q8NGC9, Q8NGG2, Q8NGG3, Q8NGH5, Q8NGH8, Q8NGN1, Q8NGS4, Q8NGY7, Q8NHC4, Q8NI32, Q8TBE1, Q8TCU5, Q8TDF5, Q8WXA2, Q8WXA8, Q8WXS5, Q92736, Q92796, Q96G91, Q96NW7, Q96P66, Q99928, Q99996, Q9BUH8, Q9BXM7, Q9BYB0, Q9GZV3, Q9H3N8, Q9NPA1, Q9NZ94, Q9P1A6, Q9UBK2, Q9UBN1, Q9UBS5, Q9UF02, Q9ULKO, Q9UN88, Q9UPX8, Q9Y2H0, Q9Y4A9, Q9Y566, Q9Y5N1, Q9Y691, Q9Y698, P37088, P51168, P51170, P51172, O94759, Q16515, O60741, Q9NZQ8, P78348, Q8TDD5, Q9NY37, Q13002, P39086 and P48664.

[0218] Embodiment 6. The compound of any one of embodiments 1 to 4, wherein said amino-acid sequence is an amino acid sequence identified by a UniProt accession code selected from the group consisting of: P02708, P07510, P07550, P08172, P08173, P08588, P08908, P08912, P08913, P11229, P11230, P13945, P17787, P18089, P18825, P20309, P25098, P25100, P30532, P30926, P32297, P35348, P35368, P35626, P36544, P43681, Q04844, Q05901, Q07001, Q15822, Q15825, Q9GZZ6, Q9UGM1, A0A0G2JKS1, A5X5Y0, A6NL88, A8MPY1, B4DS77, B8ZZ34, O00222, O00591, O14490, O14764, O15303, O15399, O43424, O43653, O60359, O60391, O60403, O60404, O60936, O75311, O75916, O76027, O94772, O95264, O95502, O95868, O95886, P01579, P05026, P05067, P06850, P07196, P07384, POC7T3, POC8F1, PODP57, PODP58, P12931, P13500, P14416, P14867, P15382, P16066, P17342, P18505, P18507, P19634, P20594, P21452, P21728, P21917, P21918, P23415, P23416, P24046, P24387, P25021, P25101, P28221, P28222, P28223, P28335, P28472, P28476, P28566, P29274, P29275, P29323, P30411, P30542, P30556, P30939, P31644, P32418, P34903, P34969, P35367, P35372, P35462, P35609, P37288, P39086, P41594, P41595, P41597, P42261, P42262, P42263, P43119, P46098, P47869, P47870, P47898, P47901, P47972, P48058, P48067, P48167, P48169, P48549, P49354, P50052, P50406, P53355, P55000, P62955, P63252, P78334, P78352, P78509, Q00535, Q05586, Q06413, Q07699, Q12879, Q12959, Q13002, Q13003, Q13224, Q13255, Q13387, Q13639, Q13702, Q13936, Q13972, Q14289, Q14416, Q14500, Q14571, Q14573, Q14643, Q14831, Q14832, Q14833, Q14957, Q15700, Q15818, Q16099, Q16445, Q16478, Q16553, Q16602, Q401N2, Q494W8, Q5SQ64, Q6PI25, Q6TFL4, Q6UXU4, Q6ZSJ9, Q70Z44, Q86Y78, Q86YM7, Q8N1C3, Q8N2G4, Q8N2Q7, Q8N4C8, Q8NC67, Q8NFZ4, Q8NG75, Q8NGA5, Q8NGA6, Q8NGC8, Q8NGC9, Q8NGG2, Q8NGG3, Q8NGH5, Q8NGH8, Q8NGN1, Q8NGS4, Q8NGY7, Q8NHC4, Q8NI32, Q8TBE1, Q8TCU5, Q8TDF5, Q8WXA2, Q8WXA8, Q8WXS5, Q92736, Q92796, Q96G91, Q96NW7, Q96P66, Q99928, Q99996, Q9BUH8, Q9BXM7, Q9BYB0, Q9GZV3, Q9H3N8, Q9NPA1, Q9NZ94, Q9P1A6, Q9UBK2, Q9UBN1, Q9UBS5, Q9UF02, Q9ULKO, Q9UN88, Q9UPX8, Q9Y2H0, Q9Y4A9, Q9Y566, Q9Y5N1, Q9Y691, Q9Y698, P37088, P51168, P51170, P51172, O94759, Q16515, O60741, Q9NZQ8, P78348, Q8TDD5, Q9NY37, Q13002, P39086, P48664, A6NGN9, O00305, O00555, O15146, O43448, O43497, O43525, O43526, O60840, O75096, O95180, O95259, O95970, P06213, P16389, P16473, P17658, P22001, P22459, P22460, P24530, P42658, P43146, P48547, P49418, P51787, P54284, P54289, P56696, Q00975, Q01668, Q02246, Q02641, Q03721, Q05329, Q06432, Q08289, Q09470, Q12809, Q13018, Q13303, Q13698, Q14003, Q14721, Q14722, Q15878, Q6PIL6, Q6PIU1, Q6X4W1, Q7Z3S7, Q7Z429, Q8IZS8, Q8NCM2, Q8TAE7, Q8TDN1, Q8TDN2, Q8WWG9, Q92953, Q96KK3, Q96L42, Q96PR1, Q96RP8, Q9BQ31, Q9BXT2, Q9H252, Q9H3M0, Q9NR82, Q9NS40, Q9NS61, Q9NSA2, Q9NY47, Q9NZI2, Q9NZV8, Q9POX4, Q9UHC6, Q9UIX4, Q9UJ90, Q9UJ96, Q9UK17, Q9ULD8, Q9ULS6, Q9UQ05, Q9Y2W7, Q9Y6H6 and Q9Y6J6.

[0219] Embodiment 7. The compound of any one of embodiments 1 to 4, wherein said amino-acid sequence is an amino acid sequence identified by a UniProt accession code selected from the group consisting of: O00555, O43497, O95180, P02708, P18505, P31644, P41594, P42263, Q00975, Q01668, Q05586, Q13224, Q13936, Q14957, Q15878, Q16445, Q8TCU5, Q9POX4, A6NGN9, O15399, O60840, P14416, P16473, P23415, P34903, P42261, P42262, P42658, P47869, Q09470, Q12879, Q13255, Q9UHC6, O15146, O95970, P14867, P28472, P47870, P48169, and P49418.

[0220] Embodiment 8. The compound of any one of embodiments 1 to 4, wherein said amino-acid sequence is an amino acid sequence identified by a UniProt accession code selected from the group consisting of: P02708, P18505, P31644, P41594, P42263, Q05586, Q13224, Q13936, Q14957, Q16445, Q8TCU5, O15399, P14416, P23415, P34903, P42261, P42262, P47869, Q12879, Q13255, P14867, P28472, P47870, and P48169.

[0221] Embodiment 9. The compound of any one of embodiments 1 to 8, wherein, for at least one of the peptides (preferably for each of the peptides), said amino-acid fragment comprises at least 4, preferably at least 5 or even at least 6, more preferably at least 7 or even at least 8, yet more preferably at least 9, even more preferably at least 10, yet even more preferably at least 11, especially at least 12 or even 13 consecutive amino acids of a sequence identified by any one of SEQ ID NOs: 45-3536 (with the proviso that the UniProt accession code of said amino-acid sequence and the UniProt accession code of the SEQ ID NO given in Table 1 is the same), preferably any one of SEQ ID NOs: 45-863 (with the proviso that the UniProt accession code of said amino-acid sequence and the UniProt accession code of the SEQ ID NO given in Table 1 is the same), especially any one of SEQ ID NOs: 45-201 (with the proviso that the UniProt accession code of said amino-acid sequence and the UniProt accession code of the SEQ ID NO given in Table 1 is the same), optionally wherein at most three, preferably at most two, more preferably at most one amino acid is independently substituted by any other amino acid. Embodiment 10. The compound of any one of embodiments 1 to 9, wherein, for at least one of the peptides (preferably for each of the peptides), said amino-acid fragment comprises at least 4, preferably at least 5 or even at least 6, more preferably at least 7 or even at least 8, yet more preferably at least 9, even more preferably at least 10, yet even more preferably at least 11, especially at least 12 or even 13 consecutive amino acids of a sequence listed in Table 3 (with the proviso that the UniProt accession code of said amino-acid sequence and the UniProt accession code of said sequence listed in Table 3 is the same), optionally wherein at most three, preferably at most two, more preferably at most one amino acid is independently substituted by any other amino acid.

[0222] Embodiment 11. The compound of any one of embodiments 1 to 10, wherein at most three, preferably at most two, more preferably at most one amino acid of said fragment is independently substituted by any other amino acid.

[0223] Embodiment 12. The compound of any one of embodiments 1 to 10, wherein three amino acids of said fragment are independently substituted by any other amino acid.

[0224] Embodiment 13. The compound of any one of embodiments 1 to 10, wherein two amino acids of said fragment are independently substituted by any other amino acid.

[0225] Embodiment 14. The compound of any one of embodiments 1 to 10, wherein one amino acid of said fragment is substituted by any other amino acid.

[0226] Embodiment 15. The compound of any one of embodiments 1 to 14, wherein the biopolymer scaffold is a human protein.

[0227] Embodiment 16. The compound of any one of embodiments 1 to 15, wherein the at least two peptides comprise a peptide P₁ and a peptide P₂, wherein P₁ and P₂ independently comprise a 6-amino-acid fragment, preferably a 7-, more preferably an 8-, more preferably a 9-, even more preferably a 10-, yet even more preferably an 11-, especially a 12-, most preferably a 13-amino-acid fragment, of an amino acid sequence as defined in any one of embodiments 1 to 14, wherein P₁ and P₂ are present in form of a peptide dimer Pᵢ-S-P₂, wherein S is a non-peptide spacer, wherein the peptide dimer is covalently bound to the biopolymer scaffold, preferably via a linker.

[0228] Embodiment 17. The compound of any one of embodiments 1 to 16, wherein the biopolymer scaffold is selected from human globulins and human albumin.

[0229] Embodiment 18. The compound of any one of embodiments 1 to 17, wherein at least one of the at least two peptides is circularized.

[0230] Embodiment 19. The compound of any one of embodiments 1 to 18, wherein each of the at least two peptides is circularized.

[0231] Embodiment 20. The compound of any one of embodiments 1 to 19, wherein the compound is non-immunogenic in humans.

[0232] Embodiment 21. The compound of any one of embodiments 1 to 20, wherein the biopolymer scaffold is selected from human transferrin and human albumin.

[0233] Embodiment 22. A compound, preferably the compound of any one of embodiments 1 to 21, comprising
[0234] a biopolymer scaffold and at least
[0235] a first peptide n-mer of the general formula:

P(-S-P)₍ₙ₋₁₎ and
[0236] a second peptide n-mer of the general formula: P(-S-P)₍ₙ₋₁₎;
[0237] wherein, independently for each occurrence, P is a peptide as defined in any one of embodiments 1 to 14, and S is a non-peptide spacer,
[0238] wherein, independently for each of the peptide n-mers, n is an integer of at least 1, preferably of at least 2, more preferably of at least 3, especially of at least 4,
[0239] wherein each of the peptide n-mers is bound to the biopolymer scaffold, preferably via a linker each.

[0240] Embodiment 23. The compound of embodiment 22, wherein at least one occurrence of P is a circularized peptide, preferably wherein at least 10% of all occurrences of P are circularized peptides, more preferably wherein at least 25% of all occurrences of P are circularized peptides, yet more preferably wherein at least 50% of all occurrences of P are circularized peptides, even more preferably wherein at least 75% of all occurrences of P are circularized peptides, yet even more preferably wherein at least 90% of all occurrences of P are circularized peptides or even wherein at least 95% of all occurrences of P are circularized peptides, especially wherein all of the occurrences of P are circularized peptides.

[0241] Embodiment 24. The compound of embodiment 22 or 23, wherein, independently for each of the peptide n-mers, n is at least 2, more preferably at least 3, especially at least 4.

[0242] Embodiment 25. The compound of any one of embodiments 22 to 24, wherein, independently for each of the peptide n-mers, n is less than 10, preferably less than 9, more preferably less than 8, even more preferably less than 7, yet even more preferably less than 6, especially less than 5.

[0243] Embodiment 26. The compound of any one of embodiments 22 to 25, wherein, for each of the peptide n-mers, n is 2.

[0244] Embodiment 27. The compound of any one of embodiments 22 to 26, wherein at least one occurrence of P is Pₐ and/or at least one occurrence of P is P_{b},
[0245] wherein Pₐ and P_{b} each independently is a peptide as defined in any one of embodiments 1 to 14.

[0246] Embodiment 28. The compound of any one of embodiments 22 to 27, wherein, independently for each occurrence, P is Pₐ or P_{b}.

[0247] Embodiment 29. The compound of any one of embodiments 22 to 28, wherein, in the first peptide n-mer, each occurrence of P is Pₐ and, in the second peptide n-mer, each occurrence of P is P_{b}.

[0248] Embodiment 30. The compound of any one of embodiments 22 to 29, wherein
[0249] the first peptide n-mer is Pₐ-S-Pₐ and the second peptide n-mer is Pₐ-S-Pₐ; or
[0250] the first peptide n-mer is Pₐ-S-Pₐ and the second peptide n-mer is P_{b}-S-P_{b};
[0251] the first peptide n-mer is P_{b}-S-P_{b} and the second peptide n-mer is P_{b}-S-P_{b};
[0252] the first peptide n-mer is Pₐ-S-P_{b} and the second peptide n-mer is Pₐ-S-P_{b};
[0253] the first peptide n-mer is Pₐ-S-P_{b} and the second peptide n-mer is Pₐ-S-Pₐ; or
[0254] the first peptide n-mer is Pₐ-S-P_{b} and the second peptide n-mer is P_{b}-S-P_{b}.

[0255] Embodiment 31. A compound comprising
[0256] a biopolymer scaffold and at least
[0257] a first peptide n-mer which is a peptide dimer of the formula Pₐ-S-Pₐ or Pₐ-S-P_{b},
[0258] wherein Pₐ and P_{b} each independently is a peptide as defined in any one of embodiments 1 to 14, and S is a non-peptide spacer,
   [0259] wherein the first peptide n-mer is bound to the biopolymer scaffold, preferably via a linker.

[0260] Embodiment 32. The compound of embodiment 31, further comprising a second peptide n-mer which is a peptide dimer of the formula P_{b}-S-P_{b} or Pₐ-S-P_{b},
[0261] wherein the second peptide n-mer is bound to the biopolymer scaffold, preferably via a linker.

[0262] Embodiment 33. The compound of any one of embodiments 22 to 30 and 32, wherein the first peptide n-mer is different from the second peptide n-mer.

[0263] Embodiment 34. The compound of any one of embodiments 27 to 33, wherein the peptide Pₐ is different from the peptide P_{b}, preferably wherein the peptide Pₐ and the peptide P_{b} are two different epitopes of the same antigen or two different epitope parts of the same epitope.

[0264] Embodiment 35. The compound of any one of embodiments 27 to 34, wherein the peptide Pₐ and the peptide P_{b} comprise the same amino-acid sequence fragment, wherein the amino-acid sequence fragment has a length of at least 2 amino acids, preferably at least 3 amino acids, more preferably at least 4 amino acids, yet more preferably at least 5 amino acids, even more preferably at least 6 amino acids, yet even more preferably at least 7 amino acids, especially at least 8 amino acids or even at least 9 amino acids.

[0265] Embodiment 36. The compound of any one of embodiments 27 to 35, wherein Pₐ and/or P_{b} is circularized.

[0266] Embodiment 37. The compound of any one of embodiments 22 to 36, wherein the compound comprises a plurality of said first peptide n-mer and/or a plurality of said second peptide n-mer.

[0267] Embodiment 38. The compound of any one of embodiments 1 to 37, wherein the biopolymer scaffold is a protein, preferably a mammalian protein such as a human protein, a non-human primate protein, a sheep protein, a pig protein, a dog protein or a rodent protein.

[0268] Embodiment 39. The compound of any one of embodiments 1 to 38, wherein the biopolymer scaffold is a globulin.

[0269] Embodiment 40. The compound of any one of embodiments 1 to 39, wherein the biopolymer scaffold is selected from the group consisting of immunoglobulins, alpha1-globulins, alpha2-globulins and beta-globulins.

[0270] Embodiment 41. The compound of any one of embodiments 1 to 40, wherein the biopolymer scaffold is selected from the group consisting of immunoglobulin G, haptoglobin and transferrin.

[0271] Embodiment 42. The compound of any one of embodiments 1 to 41, wherein the biopolymer scaffold is haptoglobin.

[0272] Embodiment 43. The compound of any one of embodiments 1 to 38, wherein the biopolymer scaffold is an albumin.

[0273] Embodiment 44. The compound of embodiment 38, wherein the biopolymer scaffold is an anti-CD163 antibody (i.e. an antibody specific for a CD163 protein) or CD163-binding fragment thereof.

[0274] Embodiment 45. The compound of embodiment 44, wherein the anti-CD163 antibody or CD163-binding fragment thereof is specific for human CD163 and/or is specific for the extracellular region of CD163, preferably for an SRCR domain of CD163, more preferably for any one of SRCR domains 1-9 of CD163, even more preferably for any one of SRCR domains 1-3 of CD163, especially for SRCR domain 1 of CD163.

[0275] Embodiment 46. The compound of embodiment 44 or 45, wherein the anti-CD163 antibody or CD163-binding fragment thereof is specific for one of the following peptides:
[0276] a peptide consisting of 7-25, preferably 8-20, even more preferably 9-15, especially 10-13 amino acids, wherein the peptide comprises the amino acid sequence CSGRVEVKVQEEWGTVCNNGWSMEA (SEQ ID NO: 3) or a 7-24 amino-acid fragment thereof,
[0277] a peptide consisting of 7-25, preferably 8-20, even more preferably 9-15, especially 10-13 amino acids, wherein the peptide comprises the amino acid sequence DHVSCRGNESALWDCKHDGWG (SEQ ID NO: 13) or a 7-20 amino-acid fragment thereof, or
[0278] a peptide consisting of 7-25, preferably 8-20, even more preferably 9-15, especially 10-13 amino acids, wherein the peptide comprises the amino acid sequence SSLGGTDKELRLVDGENKCS (SEQ ID NO: 24) or a 7-19 amino-acid fragment thereof.

[0279] Embodiment 47. The compound of embodiment 44 or 45, wherein the anti-CD163 antibody or CD163-binding fragment thereof is specific for a peptide comprising the amino acid sequence ESALW (SEQ ID NO: 14) or ALW.

[0280] Embodiment 48. The compound of embodiment 44 or 45, wherein the anti-CD163 antibody or CD163-binding fragment thereof is specific for a peptide comprising the amino acid sequence GRVEVKVQEEW (SEQ ID NO: 4), WGTVCNNGWS (SEQ ID NO: 5) or WGTVCNNGW (SEQ ID NO: 6).

[0281] Embodiment 49. The compound of embodiment 44 or 45, wherein the anti-CD163 antibody or CD163-binding fragment thereof is specific for a peptide comprising the amino acid sequence SSLGGTDKELR (SEQ ID NO: 25) or SSLGG (SEQ ID NO: 26).

[0282] Embodiment 50. The compound of any one of embodiments 1 to 49, wherein the compound is non-immunogenic in a mammal, preferably in a human, in a non-human primate, in a sheep, in a pig, in a dog or in a rodent.

[0283] Embodiment 51. The compound of any one of embodiments 1 to 50, wherein the compound is for intracorporeal sequestration (or intracorporeal depletion) of at least one antibody in an individual, preferably in the bloodstream of the individual and/or for reduction of the titre of at least one antibody in the individual, preferably in the bloodstream of the individual.

[0284] Embodiment 52. The compound of any one of embodiments 1 to 51, wherein the compound further comprises at least
[0285] a third peptide n-mer of the general formula:

P(-S-P)₍ₙ₋₁),
[0286] wherein, independently for each occurrence, P is a peptide as defined in any one of embodiments 1 to 14, and S is a non-peptide spacer,
[0287] preferably wherein each occurrence of P is P_{c}, wherein P, is a peptide as defined in any one of embodiments 1 to 14,
[0288] preferably wherein P, is circularized.

[0289] Embodiment 53. The compound of embodiment 52, wherein the compound further comprises at least
[0290] a fourth peptide n-mer of the general formula:

P(-S-P)₍ₙ₋₁₎,
[0291] wherein, independently for each occurrence, P is a peptide as defined in any one of embodiments 1 to 14, and S is a non-peptide spacer,
[0292] preferably wherein each occurrence of P is P_{d}, wherein P_{d} is a peptide as defined in any one of embodiments 1 to 14,
[0293] preferably wherein P_{d} is circularized; Embodiment 54. The compound of embodiment 53, wherein the compound further comprises at least
[0294] a fifth peptide n-mer of the general formula:

P(-S-P)₍ₙ₋₁₎,
[0295] wherein, independently for each occurrence, P is a peptide as defined in any one of embodiments 1 to 14, and S is a non-peptide spacer,
[0296] preferably wherein each occurrence of P is Pₑ, wherein Pₑ is a peptide as defined in any one of embodiments 1 to 14,
[0297] preferably wherein Pₑ is circularized;

[0298] Embodiment 55. The compound of embodiment 54, wherein the compound further comprises at least
[0299] a sixth peptide n-mer of the general formula:

P(-S-P)₍ₙ₋₁₎,
[0300] wherein, independently for each occurrence, P is a peptide as defined in any one of embodiments 1 to 14, and S is a non-peptide spacer,
[0301] preferably wherein each occurrence of P is P_{f}, wherein P_{f} is a peptide as defined in any one of embodiments 1 to 14,
[0302] preferably wherein P_{f} is circularized; Embodiment 56. The compound of embodiment 55, wherein the compound further comprises at least
[0303] a seventh peptide n-mer of the general formula:

P(-S-P)₍ₙ₋₁₎,
[0304] wherein, independently for each occurrence, P is a peptide as defined in any one of embodiments 1 to 14, and S is a non-peptide spacer,
[0305] preferably wherein each occurrence of P is P_{g}, wherein P_{g} is a peptide as defined in any one of embodiments 1 to 14,
[0306] preferably wherein P_{g} is circularized;

[0307] Embodiment 57. The compound of embodiment 56, wherein the compound further comprises at least
[0308] an eighth peptide n-mer of the general formula:

P(-S-P)₍ₙ₋₁₎,
[0309] wherein, independently for each occurrence, P is a peptide as defined in any one of embodiments 1 to 14, and S is a non-peptide spacer,
[0310] preferably wherein each occurrence of P is Pₕ, wherein Pₕ is a peptide as defined in any one of embodiments 1 to 14,
[0311] preferably wherein Pₕ is circularized;

[0312] Embodiment 58. The compound of embodiment 57, wherein the compound further comprises at least
[0313] a ninth peptide n-mer of the general formula:

P(-S-P)₍ₙ₋₁₎,
[0314] wherein, independently for each occurrence, P is a peptide as defined in any one of embodiments 1 to 14, and S is a non-peptide spacer,
[0315] preferably wherein each occurrence of P is Pᵢ, wherein Pᵢ is a peptide as defined in any one of embodiments 1 to 14,
[0316] preferably wherein Pᵢ is circularized;

[0317] Embodiment 59. The compound of embodiment 58, wherein the compound further comprises at least
[0318] a tenth peptide n-mer of the general formula:

P(-S-P)₍ₙ₋₁₎,
[0319] wherein, independently for each occurrence, P is a peptide as defined in any one of embodiments 1 to 14, and S is a non-peptide spacer,
[0320] preferably wherein each occurrence of P is Pⱼ, wherein Pⱼ is a peptide as defined in any one of embodiments 1 to 14,
[0321] preferably wherein Pⱼ is circularized.

[0322] Embodiment 60. The compound of any one of embodiments 22 to 59, wherein each of the peptide n-mers is covalently bound to the biopolymer scaffold, preferably via a linker each.

[0323] Embodiment 61. The compound of any one of embodiments 1 to 60, wherein at least one of said linkers is selected from disulphide bridges and PEG molecules.

[0324] Embodiment 62. The compound of any one of embodiments 1 to 61, wherein at least one of the spacers S is selected from PEG molecules or glycans.

[0325] Embodiment 63. The compound of any one of embodiments 1 to 62, wherein the first peptide n-mer is Pₐ-S-P_{b} and the second peptide n-mer is Pₐ-S-P_{b}.

[0326] Embodiment 64. The compound of any one of embodiments 1 to 63, wherein the peptide Pₐ and the peptide P_{b} comprise the same amino-acid sequence fragment, wherein the amino-acid sequence fragment has a length of at least 5 amino acids, even more preferably at least 6 amino acids, yet even more preferably at least 7 amino acids, especially at least 8 amino acids or even at least 9 amino acids.

[0327] Embodiment 65. The compound of any one of embodiments 1 to 64, wherein the compounds is for the sequestration (or depletion) of an antibody specific for a (human) neuroreceptor, preferably wherein the neuroreceptor is defined as in any one of embodiments 1 to 8.

[0328] Embodiment 66. A pharmaceutical composition comprising the compound of any one of embodiments 1 to 65 and at least one pharmaceutically acceptable excipient.

[0329] Embodiment 67. The pharmaceutical composition of embodiment 66, wherein the molar ratio of the peptides to scaffold in the composition is from 2:1 to 100:1, preferably from 3:1 to 90:1, more preferably from 4:1 to 80:1, even more preferably from 5:1 to 70:1, yet even more preferably from 6:1 to 60:1, especially from 7:1 to 50:1 or even from 8:10 to 40:1.

[0330] Embodiment 68. The pharmaceutical composition of embodiment 66 or 67, wherein the composition is prepared for intraperitoneal, subcutaneous, intramuscular and/or intravenous administration and/or wherein the composition is for repeated administration.

[0331] Embodiment 69. The pharmaceutical composition of any one of embodiments 66 to 68, or the compound of any one of embodiments 22 to 65, wherein the molar ratio of peptide P to biopolymer scaffold in the composition is from 2:1 to 100:1, preferably from 3:1 to 90:1, more preferably from 4:1 to 80:1, even more preferably from 5:1 to 70:1, yet even more preferably from 6:1 to 60:1, especially from 7:1 to 50:1 or even from 8:10 to 40:1.

[0332] Embodiment 70. The pharmaceutical composition of any one of embodiments 66 to 69, or the compound of any one of embodiments 27 to 65 wherein the molar ratio of peptide Pₐ to biopolymer scaffold in the composition is from 2:1 to 100:1, preferably from 3:1 to 90:1, more preferably from 4:1 to 80:1, even more preferably from 5:1 to 70:1, yet even more preferably from 6:1 to 60:1, especially from 7:1 to 50:1 or even from 8:10 to 40:1.

[0333] Embodiment 71. The pharmaceutical composition of any one of embodiments 66 to 70, or the compound of any one of embodiments 27 to 65, wherein the molar ratio of peptide P_{b} to biopolymer scaffold in the composition is from 2:1 to 100:1, preferably from 3:1 to 90:1, more preferably from 4:1 to 80:1, even more preferably from 5:1 to 70:1, yet even more preferably from 6:1 to 60:1, especially from 7:1 to 50:1 or even from 8:10 to 40:1.

[0334] Embodiment 72. The pharmaceutical composition of any one of embodiments 66 to 71 for use in therapy.

[0335] Embodiment 73. The pharmaceutical composition of any one of embodiments 66 to 71 for use in prevention or treatment of an autoantibody-mediated condition, preferably selected from Myalgic Encephalomyelitis/Chronic Fatigue Syndrome (ME/CFS), postural orthostatic tachycardia syndrome (POTS), Autoimmune Autonomic Ganglionopathy (AAG), Idiopathic Dilated Cardiomyopathy (IDC), and Chronic Chagas heart disease (cChHD), or from encephalitis such as limbic encephalitis or paraneoplastic striatal encephalitis or Anti-mGluR1 encephalitis or Anti-mGluR5 encephalitis or acute disseminated encephalomyelitis (ADEM) or NMDAR encephalitis, paraneoplastic syndrome, stiff man syndrome, autoimmune channelopathies, neuromyelitis optica, neuromyotonia, Morvan's syndrome, neuropathic pain, myelitis, optic neuritis, retinitis, parkinsonism, chorea, psychosis, dystonia, mutism, movement disorders, confusion, hallucinations, prodromal diarrhoea, memory loss, hyperexcitability, encephalitis psychiatric syndrome, narcolepsy, autism spectrum disorders, seizures, status epilepticus, chronic epilepsy, myoclonus, encephalomyelitis, myoclonus, parasomnia, sleep apnoea, cognitive impairment, gait abnormalities, faciobrachial dystonic seizures, paraneoplastic syndrome, cerebellar ataxia, dysautonomia, Tourette, ADHD, cerebellar ataxia, oscillopsia, amyotrophic lateral sclerosis (ALS), thyroid disorder and headache with neurological deficits and lymphocytosis (HaNDL), in an individual.

[0336] Embodiment 74. The pharmaceutical composition for use according to embodiment 72 or 73, wherein the pharmaceutical composition is administered at least twice within a 96-hour window, preferably within a 72-hour window, more preferably within a 48-hour window, even more preferably within a 36-hour window, yet even more preferably within a 24-hour window, especially within a 18-hour window or even within a 12-hour window.

[0337] Embodiment 75. The pharmaceutical composition for use according to any one of embodiments 72 to 74, wherein the composition is administered at a dose of 1-1000 mg, preferably 2-500 mg, more preferably 3-250 mg, even more preferably 4-100 mg, especially 5-50 mg, compound per kg body weight of the individual.

[0338] Embodiment 76. The pharmaceutical composition for use according to any one of embodiments 72 to 75, wherein the composition is administered intraperitoneally, subcutaneously, intramuscularly or intravenously.

[0339] Embodiment 77. The pharmaceutical composition for use according to any one of embodiments 72 to 76, wherein one or more antibodies are present in the individual which are specific for at least one occurrence of peptide P, or for peptide Pₐ and/or peptide P_{b}.

[0340] Embodiment 78. The pharmaceutical composition for use according to any one of embodiments 72 to 77, wherein one or more antibodies are present in the individual which are specific for a neuroreceptor, preferably wherein the neuroreceptor is defined as in any one of embodiments 1 to 8.

[0341] Embodiment 79. The pharmaceutical composition for use according to any one of embodiments 72 to 78, wherein the composition is non-immunogenic in the individual.

[0342] Embodiment 80. The pharmaceutical composition for use according to any one of embodiments 72 to 79, wherein the composition is administered at a dose of 1-1000 mg, preferably 2-500 mg, more preferably 3-250 mg, even more preferably 4-100 mg, especially 5-50 mg, compound per kg body weight of the individual.

[0343] Embodiment 81. A method of ameliorating or treating an autoantibody-mediated condition, selected from CFS/ME, POTS, AAG, IDC, and cChHD, in an individual in need thereof, comprising
[0344] obtaining a pharmaceutical composition as defined in any one of embodiments 66 to 71; and
[0345] administering an effective amount of the pharmaceutical composition to the individual.

[0346] Embodiment 82. The method according to embodiment 81, wherein the method is defined as in any one of embodiments 72 to 80.

[0347] Embodiment 83. A method of sequestering (or depleting) one or more antibodies present in an individual, comprising
[0348] obtaining a pharmaceutical composition as defined in any one of embodiments 66 to 71, wherein the composition is non-immunogenic in the individual and wherein the one or more antibodies present in the individual are specific for at least one occurrence of P, or for peptide Pₐ and/or peptide P_{b}; and
[0349] administering the pharmaceutical composition to the individual.

[0350] Embodiment 84. The method of embodiment 83, wherein the one or more antibodies are specific for a neuroreceptor, preferably wherein the neuroreceptor is defined as in any one of embodiments 1 to 8.

[0351] Embodiment 85. The method of embodiment 83 or 84, wherein the individual is a non-human animal, preferably a non-human primate, a sheep, a pig, a dog or a rodent, in particular a mouse.

[0352] Embodiment 86. The method of any one of embodiments 83 to 85, wherein the biopolymer scaffold is autologous with respect to the individual, preferably wherein the biopolymer scaffold is an autologous protein.

[0353] Embodiment 87. The method of any one of embodiments 83 to 86, wherein the composition is administered intraperitoneally, subcutaneously, intramuscularly or intravenously.

[0354] Embodiment 88. A peptide (preferably with a sequence length of 6-13 amino acids), wherein the peptide comprises a 6-amino-acid fragment, preferably a 7-, more preferably an 8-, even more preferably a 9-, even more preferably a 10-, even more preferably an 11-, yet even more preferably a 12-, most preferably a 13-amino-acid fragment, of an amino-acid sequence identified by a UniProt accession code selected from the group consisting of:
[0355] P02708, P07510, P07550, P08172, P08173, P08588, P08908, P08912, P08913, P11229, P11230, P13945, P17787, P18089, P18825, P20309, P25098, P25100, P30532, P30926, P32297, P35348, P35368, P35626, P36544, P43681, Q04844, Q05901, Q07001, Q15822, Q15825, Q9GZZ6, Q9UGM1, A0A0G2JKS1, A5X5Y0, A6NL88, A8MPY1, B4DS77, B8ZZ34, O00222, O00591, O14490, O14764, O15303, O15399, O43424, O43653, O60359, O60391, O60403, O60404, O60936, O75311, O75916, O76027, O94772, O95264, O95502, O95868, O95886, P01579, P05026, P05067, P06850, P07196, P07384, POC7T3, POC8F1, PODP57, PODP58, P12931, P13500, P14416, P14867, P15382, P16066, P17342, P18505, P18507, P19634, P20594, P21452, P21728, P21917, P21918, P23415, P23416, P24046, P24387, P25021, P25101, P28221, P28222, P28223, P28335, P28472, P28476, P28566, P29274, P29275, P29323, P30411, P30542, P30556, P30939, P31644, P32418, P34903, P34969, P35367, P35372, P35462, P35609, P37288, P39086, P41594, P41595, P41597, P42261, P42262, P42263, P43119, P46098, P47869, P47870, P47898, P47901, P47972, P48058, P48067, P48167, P48169, P48549, P49354, P50052, P50406, P53355, P55000, P62955, P63252, P78334, P78352, P78509, Q00535, Q05586, Q06413, Q07699, Q12879, Q12959, Q13002, Q13003, Q13224, Q13255, Q13387, Q13639, Q13702, Q13936, Q13972, Q14289, Q14416, Q14500, Q14571, Q14573, Q14643, Q14831, Q14832, Q14833, Q14957, Q15700, Q15818, Q16099, Q16445, Q16478, Q16553, Q16602, Q401N2, Q494W8, Q5SQ64, Q6PI25, Q6TFL4, Q6UXU4, Q6ZSJ9, Q70Z44, Q86Y78, Q86YM7, Q8N1C3, Q8N2G4, Q8N2Q7, Q8N4C8, Q8NC67, Q8NFZ4, Q8NG75, Q8NGA5, Q8NGA6, Q8NGC8, Q8NGC9, Q8NGG2, Q8NGG3, Q8NGH5, Q8NGH8, Q8NGN1, Q8NGS4, Q8NGY7, Q8NHC4, Q8NI32, Q8TBE1, Q8TCU5, Q8TDF5, Q8WXA2, Q8WXA8, Q8WXS5, Q92736, Q92796, Q96G91, Q96NW7, Q96P66, Q99928, Q99996, Q9BUH8, Q9BXM7, Q9BYB0, Q9GZV3, Q9H3N8, Q9NPA1, Q9NZ94, Q9P1A6, Q9UBK2, Q9UBN1, Q9UBS5, Q9UF02, Q9ULKO, Q9UN88, Q9UPX8, Q9Y2H0, Q9Y4A9, Q9Y566, Q9Y5N1, Q9Y691, Q9Y698, P37088, P51168, P51170, P51172, O94759, Q16515, O60741, Q9NZQ8, P78348, Q8TDD5, Q9NY37, Q13002, P39086, P48664, A6NGN9, O00305, O00555, O15146, O43448, O43497, O43525, O43526, O60840, O75096, O95180, O95259, O95970, P06213, P16389, P16473, P17658, P22001, P22459, P22460, P24530, P42658, P43146, P48547, P49418, P51787, P54284, P54289, P56696, Q00975, Q01668, Q02246, Q02641, Q03721, Q05329, Q06432, Q08289, Q09470, Q12809, Q13018, Q13303, Q13698, Q14003, Q14721, Q14722, Q15878, Q6PIL6, Q6PIU1, Q6X4W1, Q7Z3S7, Q7Z429, Q8IZS8, Q8NCM2, Q8TAE7, Q8TDN1, Q8TDN2, Q8WWG9, Q92953, Q96KK3, Q96L42, Q96PR1, Q96RP8, Q9BQ31, Q9BXT2, Q9H252, Q9H3M0, Q9NR82, Q9NS40, Q9NS61, Q9NSA2, Q9NY47, Q9NZI2, Q9NZV8, Q9POX4, Q9UHC6, Q9UIX4, Q9UJ90, Q9UJ96, Q9UK17, Q9ULD8, Q9ULS6, Q9UQ05, Q9Y2W7, Q9Y6H6, Q9Y6J6, P48058, P55087, Q9BPU6, P52799, P15328, Q05329, Q16653, Q9Y4C0, Q5F0I5, Q99719, P17600, Q13148, P01266, Q9Y6A1 and P07202,
[0356] optionally wherein at most three, preferably at most two, more preferably at most one amino acid is independently substituted by any other amino acid.

[0357] Embodiment 89. The peptide of embodiment 88, wherein the peptide is further defined as in any one of embodiments 1 to 14.

[0358] Embodiment 90. A peptide, preferably with a sequence length of 7-14 amino-acids, comprising, preferably consisting of, at least 7 or even at least 8, yet more preferably at least 9, even more preferably at least 10, yet even more preferably at least 11, especially at least 12 or even 13 consecutive amino acids of a sequence identified by any one of SEQ ID NOs: 45-3536, preferably any one of SEQ ID NOs: 45-863, especially any one of SEQ ID NOs: 45-201, optionally wherein at most three, preferably at most two, more preferably at most one amino acid is independently substituted by any other amino acid.

[0359] Embodiment 91. A peptide, preferably with a sequence length of 7-14 amino-acids, comprising, preferably consisting of, the sequence identified by any one of SEQ ID NOs: 45-3536, preferably any one of SEQ ID NOs: 45-863, especially any one of SEQ ID NOs: 45-201, optionally wherein at most three, preferably at most two, more preferably at most one amino acid is independently substituted by any other amino acid.

[0360] Embodiment 92. The peptide of any one of embodiments 88 to 91, wherein the peptide is linear or circularized.

[0361] Embodiment 93. A method for detecting and/or quantifying autoantibodies in a biological sample comprising the steps of
[0362] bringing the sample into contact with the peptide of any one of embodiments 88 to 92, and
[0363] detecting the presence and/or concentration of autoantibodies in the sample.

[0364] Embodiment 94. The method of embodiment 93, wherein the peptide is immobilized on a solid support, in particular a biosensor-based diagnostic device with an electrochemical, fluorescent, magnetic, electronic, gravimetric or optical biotransducer and/or wherein the peptide is coupled to a reporter or reporter fragment, such as a reporter fragment suitable for a PCA.

[0365] Embodiment 95. The method of embodiment 93 or 94, wherein the method is a sandwich assay, preferably an enzyme-linked immunosorbent assay (ELISA).

[0366] Embodiment 96. The method of any one of embodiments 93 to 95, wherein the sample is obtained from a mammal, preferably a human.

[0367] Embodiment 97. The method of any one of embodiments 93 to 96, wherein the sample is a blood sample, preferably whole blood, serum, or plasma.

[0368] Embodiment 98. Use of the peptide according to any one of embodiments 88 to 92 in an enzyme-linked immunosorbent assay (ELISA), preferably for a method as defined in any one of embodiments 93 to 97.

[0369] Embodiment 99. A diagnostic device comprising the peptide according to any one of embodiments 88 to 92, wherein the peptide is immobilized on a solid support and/or wherein the peptide is coupled to a reporter or reporter fragment, such as a reporter fragment suitable for a PCA.

[0370] Embodiment 100. The diagnostic device according to embodiment 99, wherein the solid support is an ELISA plate or a surface plasmon resonance chip.

[0371] Embodiment 101. The diagnostic device according to embodiment 99, wherein the diagnostic device is a lateral flow assay device or a biosensor-based diagnostic device with an electrochemical, fluorescent, magnetic, electronic, gravimetric or optical biotransducer.

[0372] Embodiment 102. A diagnostic kit comprising a peptide according to any one of embodiments 88 to 92, preferably a diagnostic device according to any one of embodiment 99 to 101, and preferably one or more selected from the group of a buffer, a reagent, and instructions.

[0373] Embodiment 103. An apheresis device comprising the peptide according to any one of embodiments 88 to 92, preferably immobilized on a solid carrier.

[0374] Embodiment 104. The apheresis device according to embodiment 103, wherein the solid carrier is capable of being contacted with blood or plasma flow.

[0375] Embodiment 105. The apheresis device according to embodiment 103 or 104, wherein the solid carrier comprises the compound according to any one of embodiments 1 to 65.

[0376] Embodiment 106. The apheresis device according to any one of embodiment 103 to 105, wherein the solid carrier is a sterile and pyrogen-free column.

[0377] Embodiment 107. The apheresis device according to any one of embodiments 103 to 106, wherein the apheresis device comprises at least two, preferably at least three, more preferably at least four different peptides according to any one of embodiments 88 to 92.

[0378] The present invention is further illustrated by the following figures and examples, without being restricted thereto.

[0379] In the context of the following figures and examples the compound on which the inventive approach is based is also referred to as “Selective Antibody Depletion Compound” (SADC).

[0380] FIG. 1: SADCs successfully reduce the titre of undesired antibodies. Each compound was applied at time point 0 by i.p. injection into Balb/c mice pre-immunized by peptide immunization against a defined antigen. Each top panel shows anti-peptide titers (0.5×dilution steps; X-axis shows log(X) dilutions) against OD values (y-axis) according to a standard ELISA detecting the corresponding antibody. Each bottom panel shows titers Log IC50 (y-axis) before injection of each compound of the invention (i.e. titers at −48h and −24 h) and after application of each compound of the invention (i.e. titers +24 h, +48h and +72h after injection; indicated on the x-axis). (A) Compound with albumin as the biopolymer scaffold that binds to antibodies directed against EBNA1 (associated with pre-eclampsia). The mice were pre-immunized with a peptide vaccine carrying the EBNA-1 model epitope. (B) Compound with albumin as the biopolymer scaffold that binds to antibodies directed against a peptide derived from the human AChR protein MIR (associated with myasthenia gravis). The mice were pre-immunized with a peptide vaccine carrying the AChR MIR model epitope. (C) Compound with immunoglobulin as the biopolymer scaffold that binds to antibodies directed against EBNA1 (associated with pre-eclampsia). The mice were pre-immunized with a peptide vaccine carrying the EBNA-1 model epitope. (D) Compound with haptoglobin as the biopolymer scaffold that binds to antibodies directed against EBNA1 (associated with pre-eclampsia). The mice were pre-immunized with a peptide vaccine carrying the EBNA-1 model epitope. (E) Demonstration of selectivity using the same immunoglobulin-based compound of the invention binding to antibodies directed against EBNA1 that was used in the experiment shown in panel C. The mice were pre-immunized with an unrelated amino acid sequence. No titre reduction occurred, demonstrating selectivity of the compound.

[0381] FIG. 2: SADCs are non-immunogenic and do not induce antibody formation after repeated injection into mice. Animals C1-C4 as well as animals C5-C8 were treated i.p. with two different compounds of the invention. Control animal C was vaccinated with a KLH-peptide derived from the human AChR protein MIR. Using BSA-conjugated peptide probes T3-1, T9-1 and E005 (grey bars, as indicated in the graph), respectively, for antibody titer detection by standard ELISA at a dilution of 1:100, it could be demonstrated that antibody induction was absent in animals treated with a compound of the invention, when compared to the vaccine-treated control animal C (y-axis, OD450 nm).

[0382] FIG. 3: Successful in vitro depletion of antibodies using SADCs carrying multiple copies of monovalent or divalent peptides. SADCs with mono- or divalent peptides were very suitable to adsorb antibodies and thereby deplete them. “Monovalent” means that peptide monomers are bound to the biopolymer scaffold (i.e. n=1) whereas “divalent” means that peptide dimers are bound to the biopolymer scaffold (i.e. n=2). In the present case, the divalent peptides were “homodivalent”, i.e. the peptide n-mer of the SADC is E006—spacer—E006).

[0383] FIG. 4: Rapid, selective antibody depletion in mice using various SADC biopolymer scaffolds. Treated groups exhibited rapid and pronounced antibody reduction already at 24 hrs (in particular SADC-TF) when compared to the mock treated control group SADC-CTL (containing an unrelated peptide). SADC with albumin scaffold—SADC-ALB, SADC with immunoglobulin scaffold—SADC-IG, SADC with haptoglobin scaffold—SADC-HP, and SADC with transferrin scaffold—SADC-TF.

[0384] FIG. 5: Detection of SADCs in plasma via their peptide moieties 24 hrs after SADC injection. Both haptoglobin-scaffold-based SADCs (SADC-HP and SADC-CTL) exhibited a relatively shorter plasma half life which represents an advantage over SADCs with other biopolymer scaffolds such as SADC-ALB, SADC-IG oder SADC-TF. SADC with albumin scaffold—SADC-ALB, SADC with immunoglobulin scaffold—SADC-IG, SADC with haptoglobin scaffold—SADC-HP, and SADC with transferrin scaffold—SADC-TF.

[0385] FIG. 6: Detection of SADC-IgG complexes in plasma 24 hrs after SADC injection. Haptoglobin based SADCs were subject to accelerated clearance when compared to SADCs with other biopolymer scaffolds. SADC with albumin scaffold—SADC-ALB, SADC with immunoglobulin scaffold—SADC-IG, SADC with haptoglobin scaffold—SADC-HP, and SADC with transferrin scaffold—SADC-TF.

[0386] FIG. 7: In vitro analysis of SADC-IgG complex formation. Animals SADC-TF and -ALB showed pronounced immunocomplex formation and binding to C1q as reflected by the strong signals and by sharp signal lowering in case 1000 ng/ml SADC-TF due to the transition from antigen-antibody equilibrium to antigen excess. In contrast, in vitro immunocomplex formation with SADC-HP or SADC-IG were much less efficient when measured in the present assay. These findings corroborate the finding that haptoglobin scaffolds are advantageous over other SADC biopolymer scaffolds because of the reduced propensity to activate the complement system. SADC with albumin scaffold—SADC-ALB, SADC with immunoglobulin scaffold—SADC-IG, SADC with haptoglobin scaffold—SADC-HP, and SADC with transferrin scaffold—SADC-TF.

[0387] FIG. 8: Determination of IgG capturing by SADCs in vitro. SADC-HP showed markedly less antibody binding capacity in vitro when compared to SADC-TF or SADC-ALB. SADC with albumin scaffold—SADC-ALB, SADC with immunoglobulin scaffold—SADC-IG, SADC with haptoglobin scaffold—SADC-HP, and SADC with transferrin scaffold—SADC-TF.

[0388] FIG. 9: Blood clearance of an anti-CD163-antibody-based biopolymer scaffold. In a mouse model, mAb E10B10 (specific for murine CD163) is much more rapidly cleared from circulation than mAb Mac2-158 (specific for human CD163 but not for murine CD163, thus serving as negative control in this experiment).

### EXAMPLES

[0389] Examples 1-10 relate to the general working principle of SADCs, demonstrating the selective removal of antibodies. Example 11 relates to the specific application of this therapeutic concept to CFS/ME, POTS, AAG, IDC, and cChHD.

### Example 1: SADCs Effectively Reduce the Titre of Undesired Antibodies

[0390] Animal Models:

[0391] In order to provide in vivo models with measurable titers of prototypic undesired antibodies in human indications, BALB/c mice were immunized using standard experimental vaccination with KLH-conjugated peptide vaccines derived from established human autoantigens or anti-drug antibodies. After titer evaluation by standard peptide ELISA, immunized animals were treated with the corresponding test SADCs to demonstrate selective antibody lowering by SADC treatment. All experiments were performed in compliance with the guidelines by the corresponding animal ethics authorities.

[0392] Immunization of Mice with Model Antigens:

[0393] Female BALB/c mice (aged 8-10 weeks) were supplied by Janvier (France), maintained under a 12h light/12h dark cycle and given free access to food and water. Immunizations were performed by s.c. application of KLH carrier-conjugated peptide vaccines injected 3 times in biweekly intervals. KLH conjugates were generated with peptide T3-2 (SEQ ID NO. 33: CGRPQKRPSCIGCKG), which represents an example for molecular mimicry between a viral antigen (EBNA-1) and an endogenous human receptor antigen, namely the placental GPR50 protein, that was shown to be relevant to preeclampsia (Elliott et al.). In order to confirm the generality of this approach, a larger antigenic peptide derived from the autoimmune condition myasthenia gravis was used for immunization of mice with a human autoepitope. In analogy to peptide T3-2, animals were immunized with peptide T1-1 (SEQ ID NO. 34: LKWNPDDYGGVKKIHIPSEKGC), derived from the MIR (main immunogenic region) of the human AChR protein which plays a fundamental role in pathogenesis of the disease (Luo et al.). The T1-1 peptide was used for immunizing mice with a surrogate partial model epitope of the human AChR autoantigen. The peptide T8-1 (SEQ ID NO. 35: DHTLYTPYHTHPG) was used to immunize control mice to provide a control titer for proof of selectivity of the system. For vaccine conjugate preparation, KLH carrier (Sigma) was activated with sulfo-GMBS (Cat. Nr. 22324 Thermo), according to the manufacturer's instructions, followed by addition of either N- or C-terminally cysteinylated peptides T3-2 and T1-1 and final addition of Alhydrogel® before injection into the flank of the animals. The doses for vaccines T3-2 and T1-1 were 15 μg of conjugate in a volume of 100 ul per injection containing Alhydrogel® (InvivoGen VAC-Alu-250) at a final concentration of 1% per dose.

[0394] Generation of Prototypic SADCs:

[0395] For testing selective antibody lowering activity by SADCs of T3-2 and T1-1 immunized mice, SADCs were prepared with mouse serum albumin (MSA) or mouse immunoglobulin (mouse-Ig) as biopolymer scaffold in order to provide an autologous biopolymer scaffold, that will not induce any immune reaction in mice, or non-autologuous human haptoglobin as biopolymer scaffold (that did not induce an allogenic reaction after one-time injection within 72 hours). N-terminally cysteinylated SADC peptide E049 (SEQ ID NO. 36: GRPQKRPSCIG) and/or C-terminally cysteinylated SADC peptide E006 (SEQ ID NO. 37: VKKIHIPSEKG) were linked to the scaffold using sulfo-GMBS (Cat. Nr. 22324 Thermo)-activated MSA (Sigma; Cat. Nr. A3559) or -mouse-Ig (Sigma, 15381) or -human haptoglobin (Sigma H0138) according to the instructions of the manufacturer, thereby providing MSA-, Ig- and haptoglobin-based SADCs with the corresponding cysteinylated peptides, that were covalently attached to the lysines of the corresponding biopolymer scaffold. Beside conjugation of the cysteinylated peptides to the lysines via a bifunctional amine-to-sulfhydryl crosslinker, a portion of the added cysteinylated SADC peptides directly reacted with sulfhydryl groups of cysteins of the albumin scaffold protein, which can be detected by treating the conjugates with DTT followed by subsequent detection of free peptides using mass spectrometry or any other analytical method that detects free peptide. Finally, these SADC conjugates were dialysed against water using Pur-A-Lyzer™ (Sigma) and subsequently lyophilized. The lyophilized material was resuspended in PBS before injection into animals.

[0396] In Vivo Functional Testing of SADCs:

[0397] Prototypic SADCs, SADC-E049 and SADC-E006 were injected intraperitoneally (i.p.; as a surrogate for an intended intravenous application in humans and larger animals) into the mice that had previously been immunized with peptide vaccine T3-2 (carrying the EBNA-1 model epitope) and peptide vaccine T1-1 (carrying the AChR MIR model epitope). The applied dose was 30 μg SADC conjugate in a volume of 50 μl PBS. Blood takes were performed by submandibular vein puncture, before (−48 h, −24 h) and after (+24 h, +48 h, +72 h, etc.) i.p. SADC injections, respectively, using capillary micro-hematocrit tubes. Using ELISA analysis (see below), it was found that both prototypic SADCs were able to clearly reduce the titers over a period of at least 72 hrs in the present animal model. It could therefore be concluded that SADCs can be used to effectively reduce titers in vivo.

[0398] Titer Analysis:

[0399] Peptide ELISAs were performed according to standard procedures using 96-well plates (Nunc Medisorp plates; Thermofisher, Cat Nr 467320) coated for 1 h at RT with BSA-coupled peptides (30 nM, dissolved in PBS) and incubated with the appropriate buffers while shaking (blocking buffer, 1% BSA, 1×PBS; washing buffer, 1×PBS/0.1% Tween; dilution buffer, 1×PBS/0.1% BSA/0.1% Tween). After serum incubation (dilutions starting at 1:50 in PBS; typically in 1:3 or 1:2 titration steps), bound antibodies were detected using Horseradish Peroxidase-conjugated goat anti-mouse IgG (Fc) from Jackson immunoresearch (115-035-008). After stopping the reaction, plates were measured at 450 nm for 20 min using TMB. EC50 were calculated from readout values using curve fitting with a 4-parameter logistic regression model (GraphPad Prism) according to the procedures recommended by the manufacturer. Constraining parameters for ceiling and floor values were set accordingly, providing curve fitting quality levels of R²>0.98.

[0400] FIG. 1A shows an in vivo proof of concept in a mouse model for in vivo selective plasma-lowering activity of a prototypic albumin-based SADC candidate that binds to antibodies directed against EBNA1, as a model for autoantibodies and mimicry in preeclampsia (Elliott et al.). For these mouse experiments, mouse albumin was used, in order to avoid any reactivity against a protein from a foreign species. Antibody titers were induced in 6 months old Balb/c mice by standard peptide vaccination. The bottom panel demonstrates that titers Log IC50 (y-axis) before SADC injection (i.e. titers at −48h and −24 h) were higher than titers Log IC50 after SADC application (i.e. titers +24 h, +48h and +72h after injection; indicated on the x-axis).

[0401] A similar example is shown in FIG. 1B, using an alternative example of a peptidic antibody binding moiety for a different disease indication. Antibody lowering activity of an albumin-based SADC in a mouse model that was pre-immunized with a different peptide derived from the human AChR protein MIR region (Luo et al.) in order to mimic the situation in myasthenia gravis. The induced antibody titers against the AChR-MIR region were used as surrogate for anti-AChR-MIR autoantibodies known to play a causative role in myasthenia gravis (reviewed by Vincent et al.). A clear titer reduction was seen after SADC application.

[0402] FIGS. 1C and 1D demonstrate the functionality of SADC variants comprising alternative biopolymer scaffolds. Specifically, FIG. 1C shows that an immunoglobulin scaffold can be successfully used whereas FIG. 1D demonstrates the use of a haptoglobin-scaffold for constructing an SADC. Both examples show an in vivo proof of concept for selective antibody lowering by an SADC, carrying covalently bound example peptide E049.

[0403] The haptoglobin-based SADC was generated using human Haptoglobin as a surrogate although the autologuous scaffold protein would be preferred. In order to avoid formation of anti-human-haptoglobin antibodies, only one single SADC injection per mouse of the non-autologuous scaffold haptoglobin was used for the present experimental conditions. As expected, under the present experimental conditions (i.e. one-time application), no antibody reactivity was observed against the present surrogate haptoglobin homologue.

[0404] FIG. 1E demonstrates the selectivity of the SADC system. The immunoglobulin-based SADC carrying the peptide E049 (i.e. the same as in FIG. 1C) cannot reduce the Ig-titer that was induced by a peptide vaccine with an unrelated, irrelevant aminoacid sequence, designated peptide T8-1 (SEQ ID NO. 35: DHTLYTPYHTHPG). The example shows an in vivo proof of concept for the selectivity of the system. The top panel shows anti-peptide T8-1 titers (0.5× dilution steps starting from 1:50 to 1:102400; X-axis shows log(X) dilutions) against OD values (y-axis) according to a standard ELISA. T8-1-titers are unaffected by administration of SADC-Ig-E049 after application. The bottom panel demonstrates that the initial titers Log IC50 (y-axis) before SADC injection (i.e. titers at −48h and −24 h) are unaffected by administration of SADC-Ig-E049 (arrow) when compared to the titers Log IC50 after SADC application (i.e. titers +24 h, +48h and +72h; as indicated on the x-axis), thereby demonstrating the selectivity of the system.

### Example 2: Immunogenicity of SADCs

[0405] In order to exclude immunogenicity of SADCs, prototypic candidate SADCs were tested for their propensity to induce antibodies upon repeated injection. Peptides T3-1 and T9-1 were used for this test. T3-1 is a 10-amino acid peptide derived from a reference epitope of the Angiotensin receptor, against which agonistic autoantibodies are formed in a pre-eclampsia animal model (Zhou et al.); T9-1 is a 12-amino acid peptide derived from a reference anti-drug antibody epitope of human IFN gamma (Lin et al.). These control SADC conjugates were injected 8× every two weeks i.p. into naïve, non-immunized female BALB/c mice starting at an age of 8-10 weeks.

[0406] Animals C1-C4 were treated i.p. (as described in example 1) with SADC T3-1. Animals C5-C8 were treated i.p. with an SADC carrying the peptide T9-1. As a reference signal for ELISA analysis, plasma from a control animal that was vaccinated 3 times with KLH-peptide T1-1 (derived from the AChR-MIR, explained in Example 1) was used. Using BSA-conjugated peptide probes T3-1, T9-1 and E005 (SEQ ID NO. 38: GGVKKIHIPSEK), respectively, for antibody titer detection by standard ELISA at a dilution of 1:100, it could be demonstrated that antibody induction was absent in SADC-treated animals, when compared to the vaccine-treated control animal C (see FIG. 2). The plasmas were obtained by submandibular blood collection, 1 week after the 3rd vaccine injection (control animal C) and after the last of 8 consecutive SADC injections in 2-weeks intervals (animals C1-C8), respectively. Thus it was demonstrated that SADCs are non-immunogenic and do not induce antibody formation after repeated injection into mice.

### Example 3: Successful In Vitro Depletion of Antibodies Using SADCs Carrying Multiple Copies of Monovalent or Divalent Peptides

[0407] Plasma of E006-KLH (VKKIHIPSEKG (SEQ ID NO: 37) with C-terminal cysteine, conjugated to KLH) vaccinated mice was diluted 1:3200 in dilution buffer (PBS+0.1% w/v BSA+0.1% Tween20) and incubated (100 μl, room temperature) sequentially (10 min/well) four times on single wells of a microtiter plate that was coated with 2.5 μg/ml (250 ng/well) of SADC or 5 μg/ml (500 ng/well) albumin as negative control.

[0408] In order to determine the amount of free, unbound antibody present before and after incubation on SADC coated wells, 50 μl of the diluted serum were taken before and after the depletion and quantified by standard ELISA using E006-BSA coated plates (10 nM peptide) and detection by goat anti mouse IgG bio (Southern Biotech, diluted 1:2000). Subsequently, the biotinylated antibody was detected with Streptavidin-HRP (Thermo Scientific, diluted 1:5000) using TMB as substrate. Development of the signal was stopped with 0.5 M sulfuric acid.

[0409] ELISA was measured at OD450 nm (y-axis). As a result, the antibody was efficiently adsorbed by either coated mono- or divalent SADCs containing peptide E006 with C-terminal cysteine (sequence VKKIHIPSEKGC, SEQ ID NO: 39) (before=non-depleted starting material; mono-divalent corresponds to peptides displayed on the SADC surface; neg. control was albumin; indicated on the x-axis). See FIG. 3. (“Monovalent” means that peptide monomers are bound to the biopolymer scaffold (i.e. n=1) whereas “divalent” means that peptide dimers are bound to the biopolymer scaffold (i.e. n=2). In the present case, the divalent peptides were “homodivalent”, i.e. the peptide n-mer of the SADC is E006-S-E006.)

[0410] This demonstrates that SADCs with mono- or divalent peptides are very suitable to adsorb antibodies and thereby deplete them.

### Example 4: Generation of Mimotope-Based SADCs

[0411] Linear and circular peptides derived from wild-type or modified peptide amino acid sequences can be used for the construction of specific SADCs for the selective removal of harmful, disease-causing or otherwise unwanted antibodies directed against a particular epitope. In case of a particular epitope, linear peptides or constrained peptides such as cyclopeptides containing portions of an epitope or variants thereof, where for example, one or several amino acids have been substituted or chemically modified in order to improve affinity to an antibody (mimotopes), can be used for constructing SADCs. A peptide screen can be performed with the aim of identifying peptides with optimized affinity to a disease-inducing autoantibody. The flexibility of structural or chemical peptide modification provided a solution to minimize the risk of immunogenicity, in particular of binding of the peptide to HLA and thus the risk of unwanted immune stimulation.

[0412] Therefore, wild-type as well as modified linear and circular peptide sequences were derived from a known epitope associated with an autoimmune disease. Peptides of various length and positions were systematically permutated by amino acid substitutions and synthesized on a peptide array. This allowed screening of 60000 circular and linear wild-type and mimotope peptides derived from these sequences. The peptide arrays were incubated with an autoantibody known to be involved in the autoimmune disease. This autoantibody was therefore used to screen the 60000 peptides and 100 circular and 100 linear peptide hits were selected based on their relative binding strength to the autoantibody. Of these 200 peptides, 51 sequences were identical between the circular and the linear peptide group. All of the best peptides identified had at least one amino acid substitution when aligned to the original sequences, respectively and are therefore regarded as mimotopes. It also turned out that higher binding strengths can be achieved with circularized peptides.

[0413] These newly identified peptides, preferentially those with high relative binding values, are used to generate SADCs that are able to remove autoantibodies directed against this particular epitope or to develop further mimotopes and derivatives based on their sequences.

### Example 5: Rapid, Selective Antibody Depletion in Mice Using Various SADC Biopolymer Scaffolds

[0414] 10 μg of model undesired antibody mAB anti V5 (Thermo Scientific) was injected i.p. into female Balb/c mice (5 animals per treatment group; aged 9-11 weeks) followed by intravenous injection of 50 μg SADC (different biopolymer scaffolds with tagged V5 peptides bound, see below) 48 hrs after the initial antibody administration. Blood was collected at 24 hrs intervals from the submandibular vein. Blood samples for time point 0 hrs were taken just before SADC administration.

[0415] Blood was collected every 24 hrs until time point 120 hrs after the SADC administration (x-axis). The decay and reduction of plasma anti-V5 IgG levels after SADC administration was determined by anti V5 titer readout using standard ELISA procedures in combination with coated V5-peptide-BSA (peptide sequence IPNPLLGLDC—SEQ ID NO: 40) and detection by goat anti mouse IgG bio (Southern Biotech, diluted 1:2000) as shown in FIG. 4. In addition, SADC levels (see Example 6) and immunocomplex formation (see Example 7) were analyzed.

[0416] EC50[OD450] values were determined using 4 parameter logistic curve fitting and relative signal decay between the initial level (set to 1 at time point 0) and the following time points (x-axis) was calculated as ratio of the EC50 values (y-axis, fold signal reduction EC50). All SADC peptides contained tags for direct detection of SADC and immunocomplexes from plasma samples; peptide sequences used for SADCs were: IPNPLLGLDGGSGDYKDDDDKGK(SEQ ID NO: 41)-(BiotinAca)GC (SADC with albumin scaffold—SADC-ALB, SADC with immunoglobulin scaffold—SADC-IG, SADC with haptoglobin scaffold—SADC-HP, and SADC with transferrin scaffold—SADC-TF) and unrelated peptide VKKIHIPSEKGGSGDYKDDDDKGK(SEQ ID NO: 42)-(BiotinAca)GC as negative control SADC (SADC-CTR).

[0417] The SADC scaffolds for the different treatment groups of 5 animals are displayed in black/grey shades (see inset of FIG. 4).

[0418] Treated groups exhibited rapid and pronounced antibody reduction already at 24 hrs (in particular SADC-TF) when compared to the mock treated control group SADC-CTL. SADC-CTR was used as reference for a normal antibody decay since it has no antibody lowering activity because its peptide sequence is not recognized by the administered anti V5 antibody. The decay of SADC-CTR is thus marked with a trend line, emphasizing the antibody level differences between treated and mock treated animals.

[0419] In order to determine the effectivity of selective antibody lowering under these experimental conditions, a two-way ANOVA test was performed using a Dunnett's multiple comparison test. 48 hrs after SADC administration, the antibody EC50 was highly significantly reduced in all SADC groups (p<0.0001) compared to the SADC-CTR reference group (trend line). At 120 hrs after SADC administration, antibody decrease was highly significant in the SADC-ALB and SADC-TF groups (both p<0.0001) and significant in the SADC-HP group (p=0.0292), whereas the SADC-IG group showed a trend towards an EC50 reduction(p=0.0722) 120 hrs after SADC administration. Of note, selective antibody reduction was highly significant (p<0.0001) in the SADC-ALB and SADC-TF groups at all tested time-points after SADC administration.

[0420] It is concluded that all SADC biopolymer scaffolds were able to selectively reduce antibody levels. Titer reduction was most pronounced with SADC-ALB and SADC-TF and no rebound or recycling of antibody levels was detected towards the last time points suggesting that undesired antibodies are degraded as intended.

### Example 6: Detection of SADCs in Plasma 24 Hrs after SADC Injection

[0421] Plasma levels of different SADC variants at 24 hrs after i.v. injection into Balb/c mice. Determination of Plasma levels (y-axis) of SADC-ALB, -IG, —HP, -TF and the negative control SADC-CTR (x-axis), were detected in the plasmas from the animals already described in example 5. Injected plasma SADC levels were detected by standard ELISA whereby SADCs were captured via their biotin moieties of their peptides in combination with streptavidin coated plates (Thermo Scientific). Captured SADCs were detected by mouse anti Flag-HRP antibody (Thermo Scientific, 1:2,000 diluted) detecting the Flag-tagged peptides (see also example 7):

[0422] Assuming a theoretical amount in the order of 25 μg/ml in blood after injecting 50 μg SADC i.v., the detectable amount of SADC ranged between 799 and 623 ng/ml for SADC-ALB or SADC-IG and up to approximately 5000 ng/ml for SADC-TF, 24 hrs after SADC injection. However surprisingly and in contrast, SADC-HP and control SADC-CTR (which is also a SADC-HP variant, however carrying the in this case unrelated negative control peptide E006, see previous examples), had completely disappeared from circulation 24 hrs after injection, and were not detectable anymore. See FIG. 5.

[0423] This demonstrates that both Haptoglobin scaffold-based SADCs tested in the present example ((namely SADC-HP and SADC-CTR) exhibit a relatively shorter plasma half-life which represents an advantage over SADCs such as SADC-ALB, SADC-IG oder SADC-TF in regard of their potential role in complement-dependent vascular and renal damage due to the in vivo risk of immunocomplex formation. Another advantage of SADC-HP is the accelerated clearance rate of their unwanted target antibody from blood in cases where a rapid therapeutic effect is needed. The present results demonstrate that Haptoglobin-based SADC scaffolds (as represented by SADC-HP and SADC-CTR) are subject to rapid clearance from the blood, regardless of whether SADC-binding antibodies are present in the blood, thereby minimizing undesirable immunocomplex formation and showing rapid and efficient clearance. Haptoglobin-based SADCs such as SADC-HP in the present example thus provide a therapeutically relevant advantage over other SADC biopolymer scaffolds, such as demonstrated by SADC-TF or SADC-ALB, both of which are still detectable 24 hrs after injection under the described conditions, in contrast to SADC-HP or SADC-CTR which both are completely cleared 24 hrs after injection.

### Example 7: Detection of SADC-IgG Complexes in Plasma 24 Hrs after SADC Injection

[0424] In order to determine the amount IgG bound to SADCs in vivo, after i.v. injection of 10 μg anti V5 IgG (Thermo Scientific) followed by injection of SADC-ALB, —HP, -TF and -CTR (50 μg) administered i.v. 48h after antibody injection, plasma was collected from the submandibular vein, 24 hrs after SADC injection, and incubated on streptavidin plates for capturing SADCs from plasma via their biotinylated SADC-V5-peptide [IPNPLLGLDGGSGDYKDDDDKGK(SEQ ID NO: 41) (BiotinAca)GC or in case of SADC-CTR the negative control peptide VKKIHIPSEKGGSGDYKDDDDKGK(SEQ ID NO: 42) (BiotinAca)GC]. IgG bound to the streptavidin-captured SADCs was detected by ELISA using a goat anti mouse IgG HRP antibody (Jackson Immuno Research, diluted 1:2,000) for detection of the SADC-antibody complexes present in plasma 24 hrs after SADC injection. OD450 nm values (y-axis) obtained for a negative control serum from untreated animals were subtracted from the OD450 nm values of the test groups (x-axis) for background correction.

[0425] As shown in FIG. 6, pronounced anti-V5 antibody signals were seen in case of SADC-ALB and SADC-TF injected mice (black bars represent background corrected OD values at a dilution of 1:25, mean value of 5 mice; standard deviation error bars), whereas no antibody signal could be detected in plasmas from SADC-HP or control SADC-CTR injected animals (SADC-CTR is a negative control carrying the irrelevant peptide bio-FLG-E006 [VKKIHIPSEKGGSGDYKDDDDKGK(SEQ ID NO: 42) (BiotinAca)GC] that is not recognized by any anti V5 antibody). This demonstrates the absence of detectable amounts of SADC-HP/IgG complexes in the plasma 24 hrs after i.v. SADC application. SADC-HP is therefore subject to accelerated clearance in anti V5 pre-injected mice when compared to SADC-ALB or SADC-TF.

### Example 8: In Vitro Analysis of SADC-Immunoglobulin Complex Formation

[0426] SADC-antibody complex formation was analyzed by pre-incubating 1 μg/ml of human anti V5 antibody (anti V5 epitope tag [SV5-P-K], human IgG3, Absolute Antibody) with increasing concentrations of SADC-ALB, -IG, —HP, -TF and -CTR (displayed on the x-axis) in PBS+0.1% w/v BSA+0.1% v/v Tween20 for 2 hours at room temperature in order to allow for immunocomplex formation in vitro. After complex formation, samples were incubated on ELISA plates that had previously been coated with 10 μg/ml of human C1q (CompTech) for 1 h at room temperature, in order to allow capturing of in vitro formed immunocomplexes. Complexes were subsequently detected by ELISA using anti human IgG (Fab specific)-Peroxidase (Sigma, diluted 1:1,000). Measured signals at OD450 nm (y-axis) reflect Antibody-SADC complex formation in vitro.

[0427] As shown in FIG. 7, SADC-TF and -ALB showed pronounced immunocomplex formation and binding to C1q as reflected by the strong signals and by sharp signal lowering in case 1000 ng/ml SADC-TF due to the transition from antigen-antibody equilibrium to antigen excess. In contrast, in vitro immunocomplex formation with SADC-HP or SADC-IG were much less efficient when measured in the present assay.

[0428] Together with the in vivo data (previous examples), these findings corroborate the finding that haptoglobin scaffolds are advantageous over other SADC biopolymer scaffolds because of the reduced propensity to activate the complement system. In contrast, SADC-TF or SADC-ALB show higher complexation, and thereby carry a certain risk of activating the C1 complex with initiation of the classical complement pathway (a risk which may be tolerable in some settings, however).

### Example 9: Determination of IgG Capturing by SADCs In Vitro

[0429] Immunocomplexes were allowed to form in vitro, similar to the previous example, using 1 μg/ml mouse anti V5 antibody (Thermo Scientific) in combination with increasing amounts of SADCs (displayed on the x-axis). SADC-antibody complexes were captured on a streptavidin coated ELISA plate via the biotinylated SADC-peptides (see previous examples), followed by detection of bound anti-V5 using anti mouse IgG-HRP (Jackson Immuno Research, diluted 1:2,000).

[0430] Under these assay conditions, SADC-HP showed markedly less antibody binding capacity in vitro when compared to SADC-TF or SADC-ALB (see FIG. 8, A). The calculated EC50 values for IgG detection on SADCs were 7.0 ng/ml, 27.9 ng/ml and 55.5 ng/ml for SADC-TF, -ALB and —HP, respectively (see FIG. 8, B).

[0431] This in vitro finding is consistent with the observation (see previous examples) that SADC-HP has a lower immunocomplex formation capacity when compared to SADC-TF or SADC-ALB which is regarded as a safety advantage with respect to its therapeutic use for the depletion of unwanted antibodies.

### Example 10: In-Vivo Function of Anti-CD163-Antibody-Based SADC Biopolymer Scaffold

[0432] Rapid in vivo blood clearance of anti-mouse-CD163 mAB E10B10 (as disclosed in WO 2011/039510 A2). mAB E10B10 was resynthesized with a mouse IgG2a backbone. 50 μg mAb E10B10 and Mac2-158 (human-specific anti-CD163 mAb as disclosed in WO 2011/039510 A2, used as negative control in this example since it does not bind to mouse CD163) were injected i.v. into mice and measured after 12, 24, 36, 48, 72, 96 hours in an ELISA to determine the blood clearance.

[0433] mAb E10B10 was much more rapidly cleared from circulation than control mAb Mac2-158 was, as shown in FIG. 9, since E10B10 binds to the mouse CD163 whereas Mac2-158 is human-specific, although both were expressed as mouse IgG2a isotypes for direct comparison.

[0434] In conclusion, anti-CD163 antibodies are highly suitable as SADC scaffold because of their clearance profile. SADCs with such scaffolds will rapidly clear undesirable antibodies from circulation.

[0435] Detailed Methods:

[0436] 50 ug of biotinylated monoclonal antibodies E10B10 and biotinylated Mac2-158 were injected i.v. into mice and measured after 12, 24, 36, 48, 72, 96 hours to determine the clearance by ELISA: Streptavidin plates were incubated with plasma samples diluted in PBS+0.1% BSA+0.1% Tween20 for 1 h at room temperature (50 μl/well). After washing (3× with PBS+0.1% Tween20), bound biotinylated antibodies were detected with anti-mouse IgG+IgM-HRP antibody at a 1:1000 dilution. After washing, TMB substrate was added and development of the substrate was stopped with TMB Stop Solution. The signal at OD450 nm was read. The EC50 values were calculated by non-linear regression using 4 parametric curve fitting with constrained curves and least squares regression. EC50 values at time-point T12 (this was the first measured time-point after antibody injection) was set at 100%, all other EC50 values were compared to the levels at T12.

### Example 11: Administration of SADCs to ME/CFS, POTS, AAG, IDC, and cChHD Patients

[0437] SADCs are prepared essentially as described in Example 1, using human transferrin as biopolymer scaffold.

[0438] N-terminally cysteinylated peptides RATHQEAINCYA (SEQ ID NO: 43) and YANETC (SEQ ID NO: 44), both derived from the second extra-cellular loop of human beta-2 adrenergic receptor (UniProt accession code P07550; cf. Magnusson et al., 1989), are linked to the scaffold using sulfo-GMBS-activated human transferrin, thereby providing transferrin-based SADCs with the corresponding cysteinylated peptides, that are thereby covalently attached to the lysines of the corresponding biopolymer scaffold. These SADC conjugates are purified and resuspended in PBS.

[0439] To three ME/CFS patients 150 mg, 250 mg, and 500 mg, respectively, of resuspended SADC conjugate is administered intravenously, in order to reduce autoantibodies against beta-2 adrenergic receptors in the plasma of the patients and thereby ameliorate the symptoms of ME/CFS. The same procedure is carried out for three POTS patients, three AAG patients, three IDC patients, and three cChHD patients.

### Example 12: Peptide Microarray Screen for Autoantibody-Binding Peptides

[0440] A screening for autoantibodies against peptides on microarrays containing 72886 cyclic (and, to a lesser extent, linear) peptides (derived from 184 human neuroreceptors as well as proteins involved in neurological or neuropsychiatric conditions) with a sequence length between 7 and 14 amino-acids, was performed to identify peptide stretches from antigenic protein sequences that are recognized by autoantibodies. IgG was prepared from blood obtained from 30 human donors (including ME/CFS patients) by protein G purification. Each IgG sample was incubated with peptide microarrays and Ig binding signals were detected by fluorescence. All antibody binding signals to the peptides on the arrays were background subtracted and ranked for each sample and a deduplicated aggregate of the respective top 250 peptide hits for each donor with the corresponding protein sequence of origin (as obtained from UniProt) was compiled (designated as group III). Further, the deduplicated aggregate of the respective top 50 peptide hits for each donor was compiled and designated as group II. Finally, the deduplicated aggregate of the respective top 50 peptide hits for each donor was compiled and designated as group I.

[0441] Altogether, group I contains 157 distinct peptide hits, group II contains 819 distinct peptide hits and group III contains 3492 distinct peptide hits. Evidently, group I is a subset of group II which in turn is a subset of group III. Groups I-III correspond to 0.2%, 1.1% and 4.8%, respectively, of all peptides screened.

[0442] The peptide hits belonging to groups I-III are listed in Table 1, in the general description above.

[0443] Thus, all listed peptides, preferably peptides belonging to group II, even more preferably belonging to group I, provide sequences from which (optionally shorter) peptide sequences can be derived for antibody depletion according to the present invention. Furthermore, also other peptide sequences (or fragments) from the proteins from which the peptides of Table 1 were derived (preferably from group II, more preferably however from group I), are well suited to be used for SADCs according to the present invention. These peptides and fragments thereof are also highly suitable for autoantibody profiling for diagnostic or predictive purposes.

### Example 13: Peptide Microarray Screen for Autoantibody-Binding Peptides Based Solely on Linear Peptides

[0444] In a manner similar to example 12, blood samples from human donors were screened with a peptide microarray based solely on a selection of 62 linear peptides from human neuroreceptors listed herein. This screen provided 52 positive IgG binding hits, i.e. confirmed autoantigenic hits.

### Non-Patent References

[0445] Armstrong, Jonathan K. “The occurrence, induction, specificity and potential effect of antibodies against poly (ethylene glycol).” Pegylated protein drugs: Basic science and clinical applications. Birkhäuser Basel, 2009. 147-168.
[0446] Bornholz, Beatrice, et al. “Diagnostic and therapeutic aspects of β1-adrenergic receptor autoantibodies in human heart disease.” Autoimmunity Reviews 13.9 (2014): 954-962.
[0447] Bynke, Annie, et al. “Autoantibodies to beta-adrenergic and muscarinic cholinergic receptors in Myalgic Encephalomyelitis (ME) patients-A validation study in plasma and cerebrospinal fluid from two Swedish cohorts.” Brain, Behavior, & Immunity-Health 7 (2020): 100107.
[0448] Carter, John Mark, and Larry Loomis-Price. “B cell epitope mapping using synthetic peptides.” Current protocols in immunology 60.1 (2004): 9-4.
[0449] Cortes Rivera, Mateo, et al. “Myalgic encephalomyelitis/chronic fatigue syndrome: a comprehensive review.” Diagnostics 9.3 (2019): 91.
[0450] Dijkstra, C. D., et al. “The heterogeneity of mononuclear phagocytes in lymphoid organs: distinct macrophage subpopulations in rat recognized by monoclonal antibodies ED1, ED2 and ED3.” Microenvironments in the Lymphoid System. Springer, Boston, M A, 1985. 409-419.
[0451] Düngen, Hans-Dirk, et al. “p1-Adrenoreceptor autoantibodies in heart failure: physiology and therapeutic implications.” Circulation: Heart Failure 13.1 (2020): e006155.
[0452] Elliott, Serra E., et al. “A pre-eclampsia-associated Epstein-Barr virus antibody cross-reacts with placental GPR50.” Clinical Immunology 168 (2016): 64-71.
[0453] Erlandsson, Ann, et al. “In vivo clearing of idiotypic antibodies with antiidiotypic antibodies and their derivatives.” Molecular immunology 43.6 (2006): 599-606.
[0454] Etzerodt, Anders, et al. “Efficient intracellular drug-targeting of macrophages using stealth liposomes directed to the hemoglobin scavenger receptor CD163.” Journal of controlled release 160.1 (2012): 72-80.
[0455] Fabriek, Babs O., et al. “The macrophage scavenger receptor CD163 functions as an innate immune sensor for bacteria.” Blood 113.4 (2009): 887-892.
[0456] Galli, Jonathan, and John Greenlee. “Paraneoplastic diseases of the central nervous system.” F1000Research 9 (2020).
[0457] Garces, Jorge Carlos, et al. “Antibody-mediated rejection: a review.” The Ochsner Journal 17.1 (2017): 46.
[0458] Gardoni, Fabrizio, et al. “NMDA and AMPA receptor autoantibodies in brain disorders: from molecular mechanisms to clinical features.” Cells 10.1 (2021): 77.
[0459] Garza, Madeline, and Amanda L. Piquet. “Update in Autoimmune Movement Disorders: Newly Described Antigen Targets in Autoimmune and Paraneoplastic Cerebellar Ataxia.” Frontiers in Neurology (2021): 1451.
[0460] Gazarian, Karlen, et al. “Mimotope peptides selected from phage display combinatorial library by serum antibodies of pigs experimentally infected with Taenia solium as leads to developing diagnostic antigens for human neurocysticercosis.” Peptides 38.2 (2012): 381-388.
[0461] Gfeller, David, et al. “Current tools for predicting cancer-specific T cell immunity.” Oncoimmunology 5.7 (2016): e1177691.
[0462] Giannoccaro, Maria Pia, Sukhvir K. Wright, and Angela Vincent. “In vivo mechanisms of antibody-mediated neurological disorders: animal models and potential implications.” Frontiers in neurology 10 (2020): 1394.
[0463] Golden, Elisabeth P., and Steven Vernino. “Autoimmune autonomic neuropathies and ganglionopathies: epidemiology, pathophysiology, and therapeutic advances.” Clinical Autonomic Research 29.3 (2019): 277-288.
[0464] Granfeldt, Asger, et al. “Targeting dexamethasone to macrophages in a porcine endotoxemic model.” Critical Care Medicine 41.11 (2013): e309-e318.
[0465] Graversen, Jonas H., et al. “Targeting the hemoglobin scavenger receptor CD163 in macrophages highly increases the anti-inflammatory potency of dexamethasone.” Molecular Therapy 20.8 (2012): 1550-1558.
[0466] Gunning III, William T., et al. “Postural orthostatic tachycardia syndrome is associated with elevated G-protein coupled receptor autoantibodies.” Journal of the American Heart Association 8.18 (2019): e013602.
[0467] Gurda, Brittney L., et al. “Mapping a neutralizing epitope onto the capsid of adeno-associated virus serotype 8.” Journal of virology 86.15 (2012): 7739-7751.
[0468] Hansen, Lajla Bruntse, Soren Buus, and Claus Schafer-Nielsen. “Identification and mapping of linear antibody epitopes in human serum albumin using high-density peptide arrays.” PLoS One 8.7 (2013): e68902.
[0469] Hansen, Niels, and Charles TimAus. “Autoimmune encephalitis with psychiatric features in adults: historical evolution and prospective challenge.” Journal of Neural Transmission 128.1 (2021): 1-14.
[0470] Homma, Masayuki, et al. “A Novel Fusion Protein, AChR-Fc, Ameliorates Myasthenia Gravis by Neutralizing Antiacetylcholine Receptor Antibodies and Suppressing Acetylcholine Receptor-Reactive B Cells.” Neurotherapeutics 14.1 (2017): 191-198.
[0471] Howard Jr, James F. “Myasthenia gravis: the role of complement at the neuromuscular junction.” Annals of the New York Academy of Sciences 1412.1 (2018): 113-128.
[0472] Howarth, M., & Brune, K. D. (2018). New routes and opportunities for modular construction of particulate vaccines: stick, click and glue. Frontiers in immunology, 9, 1432.
[0473] Imamura, Michie, et al. “Ganglionic acetylcholine receptor antibodies and autonomic dysfunction in autoimmune rheumatic diseases.” International journal of molecular sciences 21.4 (2020): 1332.
[0474] Jacob, Giris, et al. “Vagal and sympathetic function in neuropathic postural tachycardia syndrome.” Hypertension 73.5 (2019): 1087-1096.
[0475] Jansson, Liselotte, et al. “Immunotherapy With Apitopes Blocks the Immune Response to TSH Receptor in HLA-DR Transgenic Mice.” Endocrinology 159.9 (2018): 3446-3457.
[0476] Jensen, Kamilla Kjmrgaard, et al. “Improved methods for predicting peptide binding affinity to MHC class II molecules.” Immunology 154.3 (2018): 394-406.
[0477] Jurtz, Vanessa, et al. “NetMHCpan-4.0: improved peptide-MHC class I interaction predictions integrating eluted ligand and peptide binding affinity data.” The Journal of Immunology 199.9 (2017): 3360-3368.
[0478] Kainulainen, Markus H., et al. “High-throughput quantitation of SARS-CoV-2 antibodies in a single-dilution homogeneous assay.” Scientific reports 11.1 (2021): 1-9.
[0479] Kaur, Divpreet, et al. “Autonomic neuropathies.” Muscle & Nerve 63.1 (2021): 10-21. Epub 2020 Sep. 14.
[0480] Kim, Do-Young, et al. “Systematic review of randomized controlled trials for chronic fatigue syndrome/myalgic encephalomyelitis (CFS/ME).” Journal of translational medicine 18.1 (2020): 1-12.
[0481] Kim, June-Bum. “Channelopathies.” Korean journal of pediatrics 57.1 (2014): 1.
[0482] Koçalo\check{g}lu-Yalçin, Zeynep, et al. “Predicting T cell recognition of MHC class I restricted neoepitopes.” Oncoimmunology 7.11 (2018): e1492508.
[0483] Labovsky, Vivian, et al. “Anti-β1-adrenergic receptor autoantibodies in patients with chronic Chagas heart disease.” Clinical & Experimental Immunology 148.3 (2007): 440-449.
[0484] Lazaridis, Konstantinos, et al. “Specific removal of autoantibodies by extracorporeal immunoadsorption ameliorates experimental autoimmune myasthenia gravis.” Journal of neuroimmunology 312 (2017): 24-30.
[0485] Leung, Nicki Y H, et al. “Screening and identification of mimotopes of the major shrimp allergen tropomyosin using one-bead-one-compound peptide libraries.” Cellular & molecular immunology 14.3 (2017): 308-318.
[0486] Li, Peipei, Li Wang, and Li-jun Di. “Applications of protein fragment complementation assays for analyzing biomolecular interactions and biochemical networks in living cells.” Journal of proteome research 18.8 (2019): 2987-2998.
[0487] Lim, Sung In, and Inchan Kwon. “Bioconjugation of therapeutic proteins and enzymes using the expanded set of genetically encoded amino acids.” Critical reviews in biotechnology 36.5 (2016): 803-815.
[0488] Lin, Chia-Hao, et al. “Identification of a major epitope by anti-interferon-γ autoantibodies in patients with mycobacterial disease.” Nature medicine 22.9 (2016): 994.
[0489] Lorentz, Kristen M., et al. “Engineered binding to erythrocytes induces immunological tolerance to E. coli asparaginase.” Science advances 1.6 (2015): e1500112.
[0490] Low P A, Engstrom J W. Disorders of the autonomic nervous system. In: Kasper D, Fauci A, Hauser S, et al, eds. Harrison's Principles of Internal Medicine. 19th ed. New York (2017)
[0491] Luo, Jie, et al. “Main immunogenic region structure promotes binding of conformation-dependent myasthenia gravis autoantibodies, nicotinic acetylcholine receptor conformation maturation, and agonist sensitivity.” Journal of Neuroscience 29.44 (2009): 13898-13908.
[0492] Luo, Jie, and Jon Lindstrom. “AChR-specific immunosuppressive therapy of myasthenia gravis.” Biochemical pharmacology 97.4 (2015): 609-619.
[0493] Madsen, Mette, et al. “Molecular Characterization of the Haptoglobin-Hemoglobin Receptor CD163 ligand binding properties of the scavenger receptor cysteine-rich domain region.” Journal of Biological Chemistry 279.49 (2004): 51561-51567.
[0494] Magnusson, Y., et al. “Antigenic analysis of the second extra-cellular loop of the human beta-adrenergic receptors.” Clinical and experimental immunology 78.1 (1989): 42.
[0495] Majowicz, Anna, et al. “Seroprevalence of pre-existing NABs against AAV1, 2, 5, 6 and 8 in the South African Hemophilia B patient population.” (2019): 3353-3353.
[0496] Masood et al, “Morvan syndrome”, In: StatPearls [Internet]. Treasure Island (FL): StatPearls Publishing; 2021.
[0497] Matsui, Shinobu, et al. “Peptides derived from cardiovascular G-protein-coupled receptors induce morphological cardiomyopathic changes in immunized rabbits.” Journal of molecular and cellular cardiology 29.2 (1997): 641-655.
[0498] Mazor, Ronit, et al. “Tolerogenic nanoparticles restore the antitumor activity of recombinant immunotoxins by mitigating immunogenicity.” Proceedings of the National Academy of Sciences 115.4 (2018): E733-E742.
[0499] McKeon, Andrew, and Eduardo E. Benarroch. “Autoimmune autonomic disorders.” Handbook of clinical neurology 133 (2016): 405-416.
[0500] Meister, Daniel, S. Maryamdokht Taimoory, and John F. Trant. “Unnatural amino acids improve affinity and modulate immunogenicity: Developing peptides to treat MHC type II autoimmune disorders.” Peptide Science 111.1 (2019): e24058.
[0501] Meyer, Carlotta, and Harald Heidecke. “Antibodies against GPCR.” Front Biosci (Landmark Ed) 23.552 (2018): 2177-2194.
[0502] Mingozzi, Federico, et al. “Overcoming preexisting humoral immunity to AAV using capsid decoys.” Science translational medicine 5.194 (2013): 194ra92-194ra92.
[0503] Mingozzi, Federico, and Katherine A. High. “Overcoming the host immune response to adeno-associated virus gene delivery vectors: the race between clearance, tolerance, neutralization, and escape.” Annual review of virology 4 (2017): 511-534.
[0504] Morimoto et. al., Bioconjugate Chemistry 25 (8) (2014): 1479-1491
[0505] Moussa, Ehab M., et al. “Immunogenicity of therapeutic protein aggregates.” Journal of pharmaceutical sciences 105.2 (2016): 417-430.
[0506] Müller, Johannes, et al. “Immunoglobulin adsorption in patients with idiopathic dilated cardiomyopathy.” Circulation 101.4 (2000): 385-391.
[0507] Müller, Manuel M. “Post-translational modifications of protein backbones: unique functions, mechanisms, and challenges.” Biochemistry 57.2 (2017): 177-185.
[0508] Nagatomo, Yuji, and W H Wilson Tang. “Autoantibodies and cardiovascular dysfunction: cause or consequence?.” Current heart failure reports 11.4 (2014): 500-508.
[0509] Nakane, Shunya, et al. “Autoimmune autonomic ganglionopathy: an update on diagnosis and treatment.” Expert review of neurotherapeutics 18.12 (2018): 953-965.
[0510] Siang Ong, Yong, et al. “Recent advances in synthesis and identification of cyclic peptides for bioapplications.” Current topics in medicinal chemistry 17.20 (2017): 2302-2318.
[0511] Palma, Jose-Alberto, et al. “Autoantibodies blocking M3 muscarinic receptors cause postganglionic cholinergic dysautonomia.” Annals of neurology 88.6 (2020): 1237-1243.
[0512] Peters, Bjoern, et al. “A community resource benchmarking predictions of peptide binding to MHC-I molecules.” PLoS computational biology 2.6 (2006): e65.
[0513] Pishesha, Novalia, et al. “Engineered erythrocytes covalently linked to antigenic peptides can protect against autoimmune disease.” Proceedings of the National Academy of Sciences (2017): 201701746.
[0514] Prüss, Harald. “Autoantibodies in neurological disease.” Nature Reviews Immunology (2021): 1-16.
[0515] Rey et al., Clinical Immunology 96 (3) (2000): 269-279
[0516] Rice et al., EMBOSS: the European Molecular Biology Open Software Suite, Trends Genet. 2000 June; 16(6):276-7
[0517] Ruff, Robert L., and Robert P. Lisak. “Nature and action of antibodies in myasthenia gravis.” Neurologic clinics 36.2 (2018): 275-291.
[0518] Rummler, Silke, et al. “Current techniques for ABO-incompatible living donor liver transplantation.” World journal of transplantation 6.3 (2016): 548.
[0519] Runcie, Karie, et al. “Bi-specific and tri-specific antibodies—the next big thing in solid tumor therapeutics.” Molecular Medicine 24.1 (2018): 50.
[0520] Ruzieh, Mohammed, et al. “The role of autoantibodies in the syndromes of orthostatic intolerance: a systematic review.” Scandinavian Cardiovascular Journal 51.5 (2017): 243-247.
[0521] Ryan, Brent J., Ahuva Nissim, and Paul G. Winyard. “Oxidative post-translational modifications and their involvement in the pathogenesis of autoimmune diseases.” Redox biology 2 (2014): 715-724.
[0522] Scheibenbogen, Carmen, et al. “Immunoadsorption to remove 92 adrenergic receptor antibodies in Chronic Fatigue Syndrome CFS/ME.” PLoS One 13.3 (2018): e0193672.
[0523] Schimke, Ingolf, et al. “Reduced oxidative stress in parallel to improved cardiac performance one year after selective removal of anti-beta 1-adrenoreceptor autoantibodies in patients with idiopathic dilated cardiomyopathy: data of a preliminary study.” Journal of Clinical Apheresis: The Official Journal of the American Society for Apheresis 20.3 (2005): 137-142.
[0524] Shanmugam, Arulkumaran, et al. “Identification of PSA peptide mimotopes using phage display peptide library.” Peptides 32.6 (2011): 1097-1102.
[0525] Shoenfeld, Yehuda, et al. “Complex syndromes of chronic pain, fatigue and cognitive impairment linked to autoimmune dysautonomia and small fiber neuropathy.” Clinical Immunology 214 (2020): 108384.
[0526] Skytthe, Maria K., Jonas Heilskov Graversen, and Soren K. Moestrup. “Targeting of CD163+Macrophages in Inflammatory and Malignant Diseases.” International Journal of Molecular Sciences 21.15 (2020): 5497.
[0527] Sørensen, Karen Kristine, et al. “Liver sinusoidal endothelial cells.” Comprehensive Physiology 5.4 (2011): 1751-1774.
[0528] Sotzny, Franziska, et al. “Myalgic encephalomyelitis/chronic fatigue syndrome-evidence for an autoimmune disease.” Autoimmunity reviews 17.6 (2018): 601-609.
[0529] Spiess, Christoph, Qianting Zhai, and Paul J. Carter. “Alternative molecular formats and therapeutic applications for bispecific antibodies.” Molecular immunology 67.2 (2015): 95-106.
[0530] Taddeo, Adriano, et al. “Selection and depletion of plasma cells based on the specificity of the secreted antibody.” European journal of immunology 45.1 (2015): 317-319.
[0531] Teschner, Sven, et al. “ABO-incompatible kidney transplantation using regenerative selective immunoglobulin adsorption.” Journal of clinical apheresis 27.2 (2012): 51-60.
[0532] Tetala, Kishore K R, et al. “Selective depletion of neuropathy-related antibodies from human serum by monolithic affinity columns containing ganglioside mimics.” Journal of medicinal chemistry 54.10 (2011): 3500-3505.
[0533] Thornton, Kristen, and Marlon 0. Mitchell. “Autonomic dysfunction: A guide for FPs.” Journal of Family Practice 66.9 (2017): 539-544.
[0534] Vincent, Angela, et al. “Serological and experimental studies in different forms of myasthenia gravis.” Annals of the New York Academy of Sciences 1413.1 (2018): 143-153.
[0535] Vincent, Angela. “Antibodies and receptors: from neuromuscular junction to central nervous system.” Neuroscience 439 (2020): 48-61.
[0536] Vuorela, A., et al. “Enhanced influenza A H1N1 T cell epitope recognition and cross-reactivity to protein-O-mannosyltransferase 1 in Pandemrix-associated narcolepsy type 1.” Nature communications 12.1 (2021): 1-17.
[0537] Wallukat, Gerd, et al. “Patients with preeclampsia develop agonistic autoantibodies against the angiotensin AT 1 receptor.” The Journal of clinical investigation 103.7 (1999): 945-952.
[0538] Wallukat, G., J. Müller, and R. Hetzer. “Specific removal of beta1-adrenergic autoantibodies from patients with idiopathic dilated cardiomyopathy: Letter to the editor.” N Engl J Med 347.22 (2002): 1806.
[0539] Wells, Rachel, et al. “Plasma exchange therapy in postural tachycardia syndrome: a novel long-term approach?.” The American journal of medicine 133.4 (2020): e157-e159.
[0540] Zhao, Sean, and Vu H. Tran. “Postural Orthostatic Tachycardia Syndrome.” StatPearls [Internet]. StatPearls Publishing, 2020.
[0541] Zhou, Cissy C., et al. “Angiotensin receptor agonistic autoantibodies induce pre-eclampsia in pregnant mice.” Nature medicine 14.8 (2008): 855.
[0542] Zong, Shenghua, et al. “Neuronal surface autoantibodies in neuropsychiatric disorders: are there implications for depression?.” Frontiers in immunology 8 (2017): 752.

1. A compound comprising a biopolymer scaffold and at least two peptides with a sequence length of 6-13 amino acids,
wherein each of the peptides independently comprises a 6-amino-acid fragment of an amino-acid sequence of a neuroreceptor, identified by a UniProt accession code selected from the group consisting of:
P02708, P07510, P07550, P08172, P08173, P08588, P08908, P08912, P08913, P11229, P11230, P13945, P17787, P18089, P18825, P20309, P25098, P25100, P30532, P30926, P32297, P35348, P35368, P35626, P36544, P43681, Q04844, Q05901, Q07001, Q15822, Q15825, Q9GZZ6, Q9UGM1, A0A0G2JKS1, A5X5Y0, A6NL88, A8MPY1, B4DS77, B8ZZ34, O00222, O00591, O14490, O14764, O15303, O15399, O43424, O43653, O60359, O60391, O60403, O60404, O60936, O75311, O75916, O76027, O94772, O95264, O95502, O95868, O95886, P01579, P05026, P05067, P06850, P07196, P07384, POC7T3, POC8F1, PODP57, PODP58, P12931, P13500, P14416, P14867, P15382, P16066, P17342, P18505, P18507, P19634, P20594, P21452, P21728, P21917, P21918, P23415, P23416, P24046, P24387, P25021, P25101, P28221, P28222, P28223, P28335, P28472, P28476, P28566, P29274, P29275, P29323, P30411, P30542, P30556, P30939, P31644, P32418, P34903, P34969, P35367, P35372, P35462, P35609, P37288, P39086, P41594, P41595, P41597, P42261, P42262, P42263, P43119, P46098, P47869, P47870, P47898, P47901, P47972, P48058, P48067, P48167, P48169, P48549, P49354, P50052, P50406, P53355, P55000, P62955, P63252, P78334, P78352, P78509, Q00535, Q05586, Q06413, Q07699, Q12879, Q12959, Q13002, Q13003, Q13224, Q13255, Q13387, Q13639, Q13702, Q13936, Q13972, Q14289, Q14416, Q14500, Q14571, Q14573, Q14643, Q14831, Q14832, Q14833, Q14957, Q15700, Q15818, Q16099, Q16445, Q16478, Q16553, Q16602, Q401N2, Q494W8, Q5SQ64, Q6PI25, Q6TFL4, Q6UXU4, Q6ZSJ9, Q70Z44, Q86Y78, Q86YM7, Q8N1C3, Q8N2G4, Q8N2Q7, Q8N4C8, Q8NC67, Q8NFZ4, Q8NG75, Q8NGA5, Q8NGA6, Q8NGC8, Q8NGC9, Q8NGG2, Q8NGG3, Q8NGH5, Q8NGH8, Q8NGN1, Q8NGS4, Q8NGY7, Q8NHC4, Q8NI32, Q8TBE1, Q8TCU5, Q8TDF5, Q8WXA2, Q8WXA8, Q8WXS5, Q92736, Q92796, Q96G91, Q96NW7, Q96P66, Q99928, Q99996, Q9BUH8, Q9BXM7, Q9BYB0, Q9GZV3, Q9H3N8, Q9NPA1, Q9NZ94, Q9P1A6, Q9UBK2, Q9UBN1, Q9UBS5, Q9UF02, Q9ULKO, Q9UN88, Q9UPX8, Q9Y2H0, Q9Y4A9, Q9Y566, Q9Y5N1, Q9Y691, Q9Y698, P37088, P51168, P51170, P51172, O94759, Q16515, O60741, Q9NZQ8, P78348, Q8TDD5, Q9NY37, Q13002, P39086, P48664, A6NGN9, O00305, O00555, O15146, O43448, O43497, O43525, O43526, O60840, O75096, O95180, O95259, O95970, P06213, P16389, P16473, P17658, P22001, P22459, P22460, P24530, P42658, P43146, P48547, P49418, P51787, P54284, P54289, P56696, Q00975, Q01668, Q02246, Q02641, Q03721, Q05329, Q06432, Q08289, Q09470, Q12809, Q13018, Q13303, Q13698, Q14003, Q14721, Q14722, Q15878, Q6PIL6, Q6PIU1, Q6X4W1, Q7Z3S7, Q7Z429, Q8IZS8, Q8NCM2, Q8TAE7, Q8TDN1, Q8TDN2, Q8WWG9, Q92953, Q96KK3, Q96L42, Q96PR1, Q96RP8, Q9BQ31, Q9BXT2, Q9H252, Q9H3M0, Q9NR82, Q9NS40, Q9NS61, Q9NSA2, Q9NY47, Q9NZI2, Q9NZV8, Q9POX4, Q9UHC6, Q9UIX4, Q9UJ90, Q9UJ96, Q9UK17, Q9ULD8, Q9ULS6, Q9UQ05, Q9Y2W7, Q9Y6H6, Q9Y6J6, P48058, P55087, Q9BPU6, P52799, P15328, Q05329, Q16653, Q9Y4C0, Q5F0I5, Q99719, P17600, Q13148, P01266, P07202, and Q9Y6A1,
optionally wherein at most three amino acids are independently substituted by any other amino acid.

2. The compound of claim 1, wherein said amino-acid sequence is an amino acid sequence of a neuroreceptor of the autonomic nervous system, identified by a UniProt accession code selected from the group consisting of: P02708, P07510, P07550, P08172, P08173, P08588, P08908, P08912, P08913, P11229, P11230, P13945, P17787, P18089, P18825, P20309, P25098, P25100, P30532, P30926, P32297, P35348, P35368, P35626, P36544, P43681, Q04844, Q05901, Q07001, Q15822, Q15825, Q9GZZ6, Q9UGM1; P37088, P51168, P51170, P51172, O94759, Q16515, O60741, Q9NZQ8, P78348, Q8TDD5, Q9NY37, Q13002, P39086, and P48664.

3. The compound of claim 1, wherein said amino acid sequence is an amino acid sequence of a neuroreceptor selected from the group consisting of muscarinic, and nicotinic cholinergic receptors, alpha- and beta-adrenergic receptors, serotonin receptors, angiotensin- and endothelin receptors.

4. The compound of claim 1, wherein said amino-acid sequence is an amino acid sequence of a neuroreceptor selected from the group consisting of beta-1 adrenergic receptor, beta-2 adrenergic receptor, M3 muscarinic acetylcholine receptor, and M4 muscarinic acetylcholine receptor, identified by a UniProt accession code selected from the group consisting of: P08588, P07550, P20309, and P08173.

5. The compound of claim 1, wherein, for at least one of the peptides, said amino-acid fragment comprises at least 4 consecutive amino acids of a sequence identified by any one of SEQ ID NOs: 45-3536, wherein at most three amino acids are independently substituted by any other amino acid.

6. The compound of claim 1, wherein the at least two peptides comprise a peptide P₁ and a peptide P₂, wherein P₁ and P₂ independently comprise a 6-amino-acid fragment of an amino acid sequence as defined in claim 1, wherein P₁ and P₂ are present in form of a peptide dimer P₁-S-P₂, wherein S is a non-peptide spacer, wherein the peptide dimer is covalently bound to the biopolymer scaffold, preferably via a linker;
wherein, for peptide P₁ and/or peptide P₂, said amino-acid fragment comprises at least 4 consecutive amino acids of a sequence identified by any one of SEQ ID NOs: 45-3536, wherein at most three amino acids are independently substituted by any other amino acid.

7. The compound of claim 1, wherein the biopolymer scaffold is selected from human globulins and human albumin.

8. The compound of claim 1, wherein at least one of the at least two peptides, is circularized.

9. The compound of claim 1, wherein the compound is non-immunogenic in humans.

10. The compound of claim 1, wherein the biopolymer scaffold is human transferrin.

11. A pharmaceutical composition comprising the compound of claim 1 and at least one pharmaceutically acceptable excipient.

12. The pharmaceutical composition of claim 11, wherein the molar ratio of the peptides to scaffold in the composition is from 2:1 to 100:1.

13. The pharmaceutical composition of claim 11, for use in prevention or treatment of an autoantibody-mediated condition, selected from Myalgic Encephalomyelitis/Chronic Fatigue Syndrome (ME/CFS), postural orthostatic tachycardia syndrome (POTS), Autoimmune Autonomic Ganglionopathy (AAG), Idiopathic Dilated Cardiomyopathy (IDC), Chronic Chagas heart disease (cChHD), encephalitis such as limbic encephalitis or paraneoplastic striatal encephalitis or Anti-mGluR1 encephalitis or Anti-mGluR5 encephalitis or acute disseminated encephalomyelitis (ADEM) or NMDAR encephalitis, paraneoplastic syndrome, stiff man syndrome, autoimmune channelopathies, neuromyelitis optica, neuromyotonia, Morvan's syndrome, neuropathic pain, myelitis, optic neuritis, retinitis, parkinsonism, chorea, psychosis, dystonia, mutism, movement disorders, confusion, hallucinations, prodromal diarrhoea, memory loss, hyperexcitability, encephalitis psychiatric syndrome, narcolepsy, autism spectrum disorders, seizures, status epilepticus, chronic epilepsy, myoclonus, encephalomyelitis, myoclonus, parasomnia, sleep apnoea, cognitive impairment, gait abnormalities, faciobrachial dystonic seizures, paraneoplastic syndrome, cerebellar ataxia, dysautonomia, Tourette, ADHD, cerebellar ataxia, oscillopsia, amyotrophic lateral sclerosis (ALS), thyroid disorder and headache with neurological deficits and lymphocytosis (HaNDL), in an individual.

14. The pharmaceutical composition for use according to claim 13, wherein the composition is administered at a dose of 1-1000 mg compound per kg body weight of the individual.

15. The pharmaceutical composition for use according to claim 13, wherein the composition is administered intraperitoneally, subcutaneously, intramuscularly or intravenously.

16. A method of ameliorating or treating an autoimmune disease or autoantibody-mediated condition, preferably ME/CFS, in an individual in need thereof, comprising:
obtaining a pharmaceutical composition as defined in claim 11; and
administering an effective amount of the pharmaceutical composition to the individual.

The application's sequence listing, which the Patent Office published only in electronic form, follows.

SEQUENCE LISTING (3536 sequences)

SEQ ID NO: 1 - protein, 116 aa, Artificial Sequence
  heavy chain variable (VH) region
DVQLQESGPGLVKPSQSLSLTCTVTGYSITSDYAWNWIRQFPGNKLEWMGYITYSGITNYNPSLKSQISITRDTSKNQFFLQLNSVTTEDTATYYCVSGTYYFDYWGQGTTLTVSS

SEQ ID NO: 2 - protein, 109 aa, Artificial Sequence
  light chain variable (VL) region
SVVMTQTPKSLLISIGDRVTITCKASQSVSSDVAWFQQKPGQSPKPLIYYASNRYTGVPDRFTGSGYGTDFTFTISSVQAEDLAVYFCGQDYTSPRTFGGGTKLEIKRA

SEQ ID NO: 3 - protein, 25 aa, Artificial Sequence
  peptide
CSGRVEVKVQEEWGTVCNNGWSMEA

SEQ ID NO: 4 - protein, 11 aa, Artificial Sequence
  peptide
GRVEVKVQEEW

SEQ ID NO: 5 - protein, 10 aa, Artificial Sequence
  peptide
WGTVCNNGWS

SEQ ID NO: 6 - protein, 9 aa, Artificial Sequence
  peptide
WGTVCNNGW

SEQ ID NO: 7 - protein, 13 aa, Artificial Sequence
  peptide
EWGTVCNNGWSME

SEQ ID NO: 8 - protein, 13 aa, Artificial Sequence
  peptide
QEEWGTVCNNGWS

SEQ ID NO: 9 - protein, 13 aa, Artificial Sequence
  peptide
WGTVCNNGWSMEA

SEQ ID NO: 10 - protein, 13 aa, Artificial Sequence
  peptide
EEWGTVCNNGWSM

SEQ ID NO: 11 - protein, 13 aa, Artificial Sequence
  peptide
VQEEWGTVCNNGW

SEQ ID NO: 12 - protein, 10 aa, Artificial Sequence
  peptide
EWGTVCNNGW

SEQ ID NO: 13 - protein, 21 aa, Artificial Sequence
  peptide
DHVSCRGNESALWDCKHDGWG

SEQ ID NO: 14 - protein, 5 aa, Artificial Sequence
  peptide
ESALW

SEQ ID NO: 15 - protein, 7 aa, Artificial Sequence
  peptide
ESALWDC

SEQ ID NO: 16 - protein, 10 aa, Artificial Sequence
  peptide
RGNESALWDC

SEQ ID NO: 17 - protein, 10 aa, Artificial Sequence
  peptide
SCRGNESALW

SEQ ID NO: 18 - protein, 13 aa, Artificial Sequence
  peptide
VSCRGNESALWDC

SEQ ID NO: 19 - protein, 10 aa, Artificial Sequence
  peptide
ALWDCKHDGW

SEQ ID NO: 20 - protein, 13 aa, Artificial Sequence
  peptide
DHVSCRGNESALW

SEQ ID NO: 21 - protein, 10 aa, Artificial Sequence
  peptide
CRGNESALWD

SEQ ID NO: 22 - protein, 13 aa, Artificial Sequence
  peptide
NESALWDCKHDGW

SEQ ID NO: 23 - protein, 13 aa, Artificial Sequence
  peptide
ESALWDCKHDGWG

SEQ ID NO: 24 - protein, 20 aa, Artificial Sequence
  peptide
SSLGGTDKELRLVDGENKCS

SEQ ID NO: 25 - protein, 11 aa, Artificial Sequence
  peptide
SSLGGTDKELR

SEQ ID NO: 26 - protein, 5 aa, Artificial Sequence
  peptide
SSLGG

SEQ ID NO: 27 - protein, 11 aa, Artificial Sequence
  peptide
SSLGGTDKELR

SEQ ID NO: 28 - protein, 10 aa, Artificial Sequence
  peptide
SSLGGTDKEL

SEQ ID NO: 29 - protein, 9 aa, Artificial Sequence
  peptide
SSLGGTDKE

SEQ ID NO: 30 - protein, 8 aa, Artificial Sequence
  peptide
SSLGGTDK

SEQ ID NO: 31 - protein, 7 aa, Artificial Sequence
  peptide
SSLGGTD

SEQ ID NO: 32 - protein, 6 aa, Artificial Sequence
  peptide
SSLGGT

SEQ ID NO: 33 - protein, 15 aa, Artificial Sequence
  peptide
CGRPQKRPSCIGCKG

SEQ ID NO: 34 - protein, 22 aa, Artificial Sequence
  peptide
LKWNPDDYGGVKKIHIPSEKGC

SEQ ID NO: 35 - protein, 13 aa, Artificial Sequence
  peptide
DHTLYTPYHTHPG

SEQ ID NO: 36 - protein, 11 aa, Artificial Sequence
  peptide
GRPQKRPSCIG

SEQ ID NO: 37 - protein, 11 aa, Artificial Sequence
  peptide
VKKIHIPSEKG

SEQ ID NO: 38 - protein, 12 aa, Artificial Sequence
  peptide
GGVKKIHIPSEK

SEQ ID NO: 39 - protein, 12 aa, Artificial Sequence
  peptide
VKKIHIPSEKGC

SEQ ID NO: 40 - protein, 10 aa, Artificial Sequence
  peptide
IPNPLLGLDC

SEQ ID NO: 41 - protein, 23 aa, Artificial Sequence
  peptide
IPNPLLGLDGGSGDYKDDDDKGK

SEQ ID NO: 42 - protein, 24 aa, Artificial Sequence
  peptide
VKKIHIPSEKGGSGDYKDDDDKGK

SEQ ID NO: 43 - protein, 12 aa, Artificial Sequence
  peptide
RATHQEAINCYA

SEQ ID NO: 44 - protein, 6 aa, Artificial Sequence
  peptide
YANETC

SEQ ID NO: 45 - protein, 11 aa, Homo sapiens
  peptide 1
GQPGAQRMYKQ

SEQ ID NO: 46 - protein, 11 aa, Homo sapiens
  peptide 2
HLPDDDKTPMS

SEQ ID NO: 47 - protein, 11 aa, Homo sapiens
  peptide 3
PGAQRMYKQSM

SEQ ID NO: 48 - protein, 11 aa, Homo sapiens
  peptide 4
PPLNHTVVQVN

SEQ ID NO: 49 - protein, 11 aa, Homo sapiens
  peptide 5
QILTGEDWNEV

SEQ ID NO: 50 - protein, 11 aa, Homo sapiens
  peptide 6
RSHRASERSLG

SEQ ID NO: 51 - protein, 11 aa, Homo sapiens
  peptide 7
SSPAPLGGQET

SEQ ID NO: 52 - protein, 14 aa, Homo sapiens
  peptide 8
EKKRRNLMLDDVIA

SEQ ID NO: 53 - protein, 14 aa, Homo sapiens
  peptide 9
LNCITIAMERPKID

SEQ ID NO: 54 - protein, 14 aa, Homo sapiens
  peptide 10
RRLEKKRRNLMLDD

SEQ ID NO: 55 - protein, 14 aa, Homo sapiens
  peptide 11
CNYSETGPPEPPYS

SEQ ID NO: 56 - protein, 14 aa, Homo sapiens
  peptide 12
LSSFLVYLVEKDVP

SEQ ID NO: 57 - protein, 14 aa, Homo sapiens
  peptide 13
VVVEGSGRVADVIA

SEQ ID NO: 58 - protein, 14 aa, Homo sapiens
  peptide 14
ASAGGAKILGVLRV

SEQ ID NO: 59 - protein, 14 aa, Homo sapiens
  peptide 15
ELGADEEQRVPYPA

SEQ ID NO: 60 - protein, 11 aa, Homo sapiens
  peptide 16
SGDPPLGDQKP

SEQ ID NO: 61 - protein, 14 aa, Homo sapiens
  peptide 17
FEPLDLGVPSGDPF

SEQ ID NO: 62 - protein, 14 aa, Homo sapiens
  peptide 18
LINVDEVNQIVTTN

SEQ ID NO: 63 - protein, 11 aa, Homo sapiens
  peptide 19
SLRSPHTHSMA

SEQ ID NO: 64 - protein, 11 aa, Homo sapiens
  peptide 20
GRTGHGLRRSS

SEQ ID NO: 65 - protein, 14 aa, Homo sapiens
  peptide 21
LGPVVCDLWLALDY

SEQ ID NO: 66 - protein, 14 aa, Homo sapiens
  peptide 22
VSPSLVQGRIVKPN

SEQ ID NO: 67 - protein, 14 aa, Homo sapiens
  peptide 23
YWPLGPVVCDLWLA

SEQ ID NO: 68 - protein, 11 aa, Homo sapiens
  peptide 24
IKVNRQLQTVN

SEQ ID NO: 69 - protein, 11 aa, Homo sapiens
  peptide 25
DPKCCDFVTNR

SEQ ID NO: 70 - protein, 11 aa, Homo sapiens
  peptide 26
KCCDFVTNRAY

SEQ ID NO: 71 - protein, 11 aa, Homo sapiens
  peptide 27
MSLASADLVMG

SEQ ID NO: 72 - protein, 11 aa, Homo sapiens
  peptide 28
EFSAEETEETF

SEQ ID NO: 73 - protein, 14 aa, Homo sapiens
  peptide 29
PGEEFSAEETEETF

SEQ ID NO: 74 - protein, 14 aa, Homo sapiens
  peptide 30
SPGEEFSAEETEET

SEQ ID NO: 75 - protein, 7 aa, Homo sapiens
  peptide 31
EETEETF

SEQ ID NO: 76 - protein, 13 aa, Homo sapiens
  peptide 32
PGEEFSAEETEET

SEQ ID NO: 77 - protein, 7 aa, Homo sapiens
  peptide 33
NLYTTYL

SEQ ID NO: 78 - protein, 7 aa, Homo sapiens
  peptide 34
EKLFSGY

SEQ ID NO: 79 - protein, 11 aa, Homo sapiens
  peptide 35
FYLPLLVMLFV

SEQ ID NO: 80 - protein, 14 aa, Homo sapiens
  peptide 36
HSKGLQILGQTLKA

SEQ ID NO: 81 - protein, 14 aa, Homo sapiens
  peptide 37
QVWLLFEYPESSGP

SEQ ID NO: 82 - protein, 11 aa, Homo sapiens
  peptide 38
VLITSLAILVF

SEQ ID NO: 83 - protein, 14 aa, Homo sapiens
  peptide 39
AKLPALASVASARE

SEQ ID NO: 84 - protein, 11 aa, Homo sapiens
  peptide 40
ALPNSGQGQKE

SEQ ID NO: 85 - protein, 14 aa, Homo sapiens
  peptide 41
WAALPNSGQGQKEG

SEQ ID NO: 86 - protein, 13 aa, Homo sapiens
  peptide 42
ALPNSGQGQKEGV

SEQ ID NO: 87 - protein, 7 aa, Homo sapiens
  peptide 43
GQGQKEG

SEQ ID NO: 88 - protein, 14 aa, Homo sapiens
  peptide 44
AVTGVNKIELPQFS

SEQ ID NO: 89 - protein, 14 aa, Homo sapiens
  peptide 45
ATLVMPFSLANELM

SEQ ID NO: 90 - protein, 14 aa, Homo sapiens
  peptide 46
VMPFSLANELMAYW

SEQ ID NO: 91 - protein, 11 aa, Homo sapiens
  peptide 47
CNKTFRTTFKM

SEQ ID NO: 92 - protein, 11 aa, Homo sapiens
  peptide 48
SSDSWNNNDAA

SEQ ID NO: 93 - protein, 11 aa, Homo sapiens
  peptide 49
APQSLLTMEEI

SEQ ID NO: 94 - protein, 11 aa, Homo sapiens
  peptide 50
GEAPQSLLTME

SEQ ID NO: 95 - protein, 11 aa, Homo sapiens
  peptide 51
TISERWQQEVA

SEQ ID NO: 96 - protein, 13 aa, Homo sapiens
  peptide 52
APQSLLTMEEIQS

SEQ ID NO: 97 - protein, 13 aa, Homo sapiens
  peptide 53
EGEAPQSLLTMEE

SEQ ID NO: 98 - protein, 13 aa, Homo sapiens
  peptide 54
GEAPQSLLTMEEI

SEQ ID NO: 99 - protein, 13 aa, Homo sapiens
  peptide 55
PQSLLTMEEIQSV

SEQ ID NO: 100 - protein, 13 aa, Homo sapiens
  peptide 56
QSLLTMEEIQSVE

SEQ ID NO: 101 - protein, 13 aa, Homo sapiens
  peptide 57
SLLTMEEIQSVEE

SEQ ID NO: 102 - protein, 13 aa, Homo sapiens
  peptide 58
GVGVFLAAFILMA

SEQ ID NO: 103 - protein, 13 aa, Homo sapiens
  peptide 59
LLRCQCRRRRRRR

SEQ ID NO: 104 - protein, 7 aa, Homo sapiens
  peptide 60
VGVRHSL

SEQ ID NO: 105 - protein, 14 aa, Homo sapiens
  peptide 61
YTIMTAHFHLKRKI

SEQ ID NO: 106 - protein, 11 aa, Homo sapiens
  peptide 62
GSARITVSKDQ

SEQ ID NO: 107 - protein, 13 aa, Homo sapiens
  peptide 63
GMASAKTKTHFSV

SEQ ID NO: 108 - protein, 13 aa, Homo sapiens
  peptide 64
LKSGLKTDKSDSE

SEQ ID NO: 109 - protein, 14 aa, Homo sapiens
  peptide 65
CRGRGRRRRRRRRR

SEQ ID NO: 110 - protein, 13 aa, Homo sapiens
  peptide 66
CQCRGRGRRRRRR

SEQ ID NO: 111 - protein, 13 aa, Homo sapiens
  peptide 67
CRGRGRRRRRRRR

SEQ ID NO: 112 - protein, 13 aa, Homo sapiens
  peptide 68
GRGRRRRRRRRRL

SEQ ID NO: 113 - protein, 13 aa, Homo sapiens
  peptide 69
QCRGRGRRRRRRR

SEQ ID NO: 114 - protein, 13 aa, Homo sapiens
  peptide 70
RGRGRRRRRRRRR

SEQ ID NO: 115 - protein, 13 aa, Homo sapiens
  peptide 71
RGRRRRRRRRRLG

SEQ ID NO: 116 - protein, 14 aa, Homo sapiens
  peptide 72
CTPCKENEYVFDEY

SEQ ID NO: 117 - protein, 14 aa, Homo sapiens
  peptide 73
NTQNFKPAPATNTQ

SEQ ID NO: 118 - protein, 14 aa, Homo sapiens
  peptide 74
TTRSITDPTDPVDY

SEQ ID NO: 119 - protein, 11 aa, Homo sapiens
  peptide 75
DQLDFWESGEW

SEQ ID NO: 120 - protein, 11 aa, Homo sapiens
  peptide 76
ELPPPDQPSPC

SEQ ID NO: 121 - protein, 11 aa, Homo sapiens
  peptide 77
PPPDQPSPCKC

SEQ ID NO: 122 - protein, 14 aa, Homo sapiens
  peptide 78
SVKEDWKYVAMVID

SEQ ID NO: 123 - protein, 13 aa, Homo sapiens
  peptide 79
AELPPPDQPSPCK

SEQ ID NO: 124 - protein, 13 aa, Homo sapiens
  peptide 80
HSAELPPPDQPSP

SEQ ID NO: 125 - protein, 7 aa, Homo sapiens
  peptide 81
PDQPSPC

SEQ ID NO: 126 - protein, 7 aa, Homo sapiens
  peptide 82
PPDQPSP

SEQ ID NO: 127 - protein, 13 aa, Homo sapiens
  peptide 83
SAELPPPDQPSPC

SEQ ID NO: 128 - protein, 14 aa, Homo sapiens
  peptide 84
LPSTCLQKVEEQPE

SEQ ID NO: 129 - protein, 11 aa, Homo sapiens
  peptide 85
SAKPLTRYMPQ

SEQ ID NO: 130 - protein, 14 aa, Homo sapiens
  peptide 86
IVLALEQHLPDGDK

SEQ ID NO: 131 - protein, 14 aa, Homo sapiens
  peptide 87
AMDILNMVFTGVFT

SEQ ID NO: 132 - protein, 11 aa, Homo sapiens
  peptide 88
KAAQTMSTSAP

SEQ ID NO: 133 - protein, 11 aa, Homo sapiens
  peptide 89
KHDREPQRRSS

SEQ ID NO: 134 - protein, 11 aa, Homo sapiens
  peptide 90
QAKAAQTMSTS

SEQ ID NO: 135 - protein, 14 aa, Homo sapiens
  peptide 91
IYIPFPEDDSNSTN

SEQ ID NO: 136 - protein, 14 aa, Homo sapiens
  peptide 92
QHSPEAACPPTAGT

SEQ ID NO: 137 - protein, 11 aa, Homo sapiens
  peptide 93
ASPPRRASSVG

SEQ ID NO: 138 - protein, 11 aa, Homo sapiens
  peptide 94
PEVRCCVDAVN

SEQ ID NO: 139 - protein, 11 aa, Homo sapiens
  peptide 95
PRLRHVLLELL

SEQ ID NO: 140 - protein, 14 aa, Homo sapiens
  peptide 96
FIWDSAVLEFEASQ

SEQ ID NO: 141 - protein, 11 aa, Homo sapiens
  peptide 97
LFLQKLPKLLC

SEQ ID NO: 142 - protein, 11 aa, Homo sapiens
  peptide 98
SIIVTVFVINV

SEQ ID NO: 143 - protein, 11 aa, Homo sapiens
  peptide 99
TLSIIVTVFVI

SEQ ID NO: 144 - protein, 13 aa, Homo sapiens
  peptide 100
LFENADGRFEGSL

SEQ ID NO: 145 - protein, 14 aa, Homo sapiens
  peptide 101
GVYNQPPPQPFPGD

SEQ ID NO: 146 - protein, 14 aa, Homo sapiens
  peptide 102
LEEDREAVRREAER

SEQ ID NO: 147 - protein, 14 aa, Homo sapiens
  peptide 103
KFKTTHAPPGDTLV

SEQ ID NO: 148 - protein, 14 aa, Homo sapiens
  peptide 104
AGESTFANNKSSVP

SEQ ID NO: 149 - protein, 14 aa, Homo sapiens
  peptide 105
EMSAGESTFANNKS

SEQ ID NO: 150 - protein, 14 aa, Homo sapiens
  peptide 106
GNIEGNAAKRRKQQ

SEQ ID NO: 151 - protein, 14 aa, Homo sapiens
  peptide 107
LGAAMALSLITFIC

SEQ ID NO: 152 - protein, 14 aa, Homo sapiens
  peptide 108
SKHSQLSDLYGKFS

SEQ ID NO: 153 - protein, 14 aa, Homo sapiens
  peptide 109
IGTDIVATVENEEP

SEQ ID NO: 154 - protein, 14 aa, Homo sapiens
  peptide 110
CYFIGTDIVATVEN

SEQ ID NO: 155 - protein, 14 aa, Homo sapiens
  peptide 111
FGKFCPHRVACKRL

SEQ ID NO: 156 - protein, 11 aa, Homo sapiens
  peptide 112
AGYPSTVSTVE

SEQ ID NO: 157 - protein, 11 aa, Homo sapiens
  peptide 113
FAQDPKFIEVT

SEQ ID NO: 158 - protein, 11 aa, Homo sapiens
  peptide 114
GQFAQDPKFIE

SEQ ID NO: 159 - protein, 14 aa, Homo sapiens
  peptide 115
PQPVPTLRLEGVES

SEQ ID NO: 160 - protein, 11 aa, Homo sapiens
  peptide 116
QGSTTATRPPR

SEQ ID NO: 161 - protein, 14 aa, Homo sapiens
  peptide 117
SSNRERHVPMCEDL

SEQ ID NO: 162 - protein, 14 aa, Homo sapiens
  peptide 118
ALAHEDCPAIDQPA

SEQ ID NO: 163 - protein, 14 aa, Homo sapiens
  peptide 119
GAAHVHGIVFEDNV

SEQ ID NO: 164 - protein, 14 aa, Homo sapiens
  peptide 120
HVHGIVFEDNVDTE

SEQ ID NO: 165 - protein, 14 aa, Homo sapiens
  peptide 121
PHMQKALEGVHYIA

SEQ ID NO: 166 - protein, 14 aa, Homo sapiens
  peptide 122
EVAITQLANVDEVN

SEQ ID NO: 167 - protein, 11 aa, Homo sapiens
  peptide 123
HCHKSNELATS

SEQ ID NO: 168 - protein, 11 aa, Homo sapiens
  peptide 124
VDMNDFWENSE

SEQ ID NO: 169 - protein, 11 aa, Homo sapiens
  peptide 125
WTYDKAEIDLL

SEQ ID NO: 170 - protein, 11 aa, Homo sapiens
  peptide 126
LGRSNTIGSAP

SEQ ID NO: 171 - protein, 11 aa, Homo sapiens
  peptide 127
MEPSSLPQEII

SEQ ID NO: 172 - protein, 14 aa, Homo sapiens
  peptide 128
LFPVAFAGFNLVYW

SEQ ID NO: 173 - protein, 14 aa, Homo sapiens
  peptide 129
RPGFGGAVTEVKTD

SEQ ID NO: 174 - protein, 11 aa, Homo sapiens
  peptide 130
GAVMNKLLTMG

SEQ ID NO: 175 - protein, 11 aa, Homo sapiens
  peptide 131
RLTIAKQTVSS

SEQ ID NO: 176 - protein, 14 aa, Homo sapiens
  peptide 132
DMNFDFDLYIVGDG

SEQ ID NO: 177 - protein, 14 aa, Homo sapiens
  peptide 133
IEHPFVFTREVDDE

SEQ ID NO: 178 - protein, 14 aa, Homo sapiens
  peptide 134
YEWKSPFGLTPKGR

SEQ ID NO: 179 - protein, 14 aa, Homo sapiens
  peptide 135
ITIIFNKFSHFYRR

SEQ ID NO: 180 - protein, 14 aa, Homo sapiens
  peptide 136
DDEDLAAKRLGIED

SEQ ID NO: 181 - protein, 14 aa, Homo sapiens
  peptide 137
LSPPPRAPPLSPGP

SEQ ID NO: 182 - protein, 14 aa, Homo sapiens
  peptide 138
ESEGEKENSTNDPE

SEQ ID NO: 183 - protein, 14 aa, Homo sapiens
  peptide 139
ESLCSIRRASSVHD

SEQ ID NO: 184 - protein, 14 aa, Homo sapiens
  peptide 140
LSFESEGEKENSTN

SEQ ID NO: 185 - protein, 14 aa, Homo sapiens
  peptide 141
RSRESLCSIRRASS

SEQ ID NO: 186 - protein, 14 aa, Homo sapiens
  peptide 142
SPTKESCSPSEADD

SEQ ID NO: 187 - protein, 14 aa, Homo sapiens
  peptide 143
TLSDDDYVNVASFN

SEQ ID NO: 188 - protein, 14 aa, Homo sapiens
  peptide 144
DEEGRGGAGGGGAG

SEQ ID NO: 189 - protein, 14 aa, Homo sapiens
  peptide 145
GGAGGGGDTEGGLC

SEQ ID NO: 190 - protein, 11 aa, Homo sapiens
  peptide 146
GRGGAGGGGAG

SEQ ID NO: 191 - protein, 14 aa, Homo sapiens
  peptide 147
RSPSWAADRSKDPP

SEQ ID NO: 192 - protein, 11 aa, Homo sapiens
  peptide 148
WGRSAAWASRR

SEQ ID NO: 193 - protein, 11 aa, Homo sapiens
  peptide 149
ASPSRDVSPMG

SEQ ID NO: 194 - protein, 11 aa, Homo sapiens
  peptide 150
GSWTYNGNQVD

SEQ ID NO: 195 - protein, 14 aa, Homo sapiens
  peptide 151
TDKVLNVTLQITLS

SEQ ID NO: 196 - protein, 13 aa, Homo sapiens
  peptide 152
VLFVYDVGESCLS

SEQ ID NO: 197 - protein, 14 aa, Homo sapiens
  peptide 153
FSRSYSELKEQQQR

SEQ ID NO: 198 - protein, 14 aa, Homo sapiens
  peptide 154
FQATWAVNNGIDTT

SEQ ID NO: 199 - protein, 14 aa, Homo sapiens
  peptide 155
KFFKNALNLIDLMS

SEQ ID NO: 200 - protein, 14 aa, Homo sapiens
  peptide 156
PRRHRRPRRVIARY

SEQ ID NO: 201 - protein, 14 aa, Homo sapiens
  peptide 157
SRDASPVGIKGFNT

SEQ ID NO: 202 - protein, 14 aa, Homo sapiens
  peptide 158
ILYAGNDRWTSDPR

SEQ ID NO: 203 - protein, 14 aa, Homo sapiens
  peptide 159
SWGSKIAPVYQQEE

SEQ ID NO: 204 - protein, 14 aa, Homo sapiens
  peptide 160
FEQGKKSVTAPKFI

SEQ ID NO: 205 - protein, 14 aa, Homo sapiens
  peptide 161
GKKSVTAPKFISPA

SEQ ID NO: 206 - protein, 14 aa, Homo sapiens
  peptide 162
SVTAPKFISPASQL

SEQ ID NO: 207 - protein, 11 aa, Homo sapiens
  peptide 163
ALMAHESGLKE

SEQ ID NO: 208 - protein, 11 aa, Homo sapiens
  peptide 164
ARKPDHTTVDI

SEQ ID NO: 209 - protein, 14 aa, Homo sapiens
  peptide 165
ASVAYENALRVFNI

SEQ ID NO: 210 - protein, 14 aa, Homo sapiens
  peptide 166
DCRGKYLLYEKNEV

SEQ ID NO: 211 - protein, 11 aa, Homo sapiens
  peptide 167
GADKQQMDAEL

SEQ ID NO: 212 - protein, 11 aa, Homo sapiens
  peptide 168
GKYLLYEKNEV

SEQ ID NO: 213 - protein, 11 aa, Homo sapiens
  peptide 169
GSYLRNGWNVM

SEQ ID NO: 214 - protein, 11 aa, Homo sapiens
  peptide 170
HHGYYRGSDYD

SEQ ID NO: 215 - protein, 11 aa, Homo sapiens
  peptide 171
LFIVVFALLGM

SEQ ID NO: 216 - protein, 11 aa, Homo sapiens
  peptide 172
LGMQLFGGQFN

SEQ ID NO: 217 - protein, 14 aa, Homo sapiens
  peptide 173
LRLLRIFKVTKYWA

SEQ ID NO: 218 - protein, 11 aa, Homo sapiens
  peptide 174
LSGEFAKERER

SEQ ID NO: 219 - protein, 11 aa, Homo sapiens
  peptide 175
MAHESGLKESP

SEQ ID NO: 220 - protein, 11 aa, Homo sapiens
  peptide 176
NPDPLPKKEEE

SEQ ID NO: 221 - protein, 14 aa, Homo sapiens
  peptide 177
NYTLLNVFLAIAVD

SEQ ID NO: 222 - protein, 11 aa, Homo sapiens
  peptide 178
QGGQPGAQRMY

SEQ ID NO: 223 - protein, 11 aa, Homo sapiens
  peptide 179
REALYNEMDPD

SEQ ID NO: 224 - protein, 11 aa, Homo sapiens
  peptide 180
RPHVSYSPVIR

SEQ ID NO: 225 - protein, 11 aa, Homo sapiens
  peptide 181
RTPLMFQRMEP

SEQ ID NO: 226 - protein, 11 aa, Homo sapiens
  peptide 182
SAAPHGSLGHA

SEQ ID NO: 227 - protein, 11 aa, Homo sapiens
  peptide 183
SGILTRECGNE

SEQ ID NO: 228 - protein, 11 aa, Homo sapiens
  peptide 184
SLKNVFNILIV

SEQ ID NO: 229 - protein, 11 aa, Homo sapiens
  peptide 185
TPRPHVSYSPV

SEQ ID NO: 230 - protein, 14 aa, Homo sapiens
  peptide 186
TVFQILTGEDWNEV

SEQ ID NO: 231 - protein, 11 aa, Homo sapiens
  peptide 187
VILAEDETDGE

SEQ ID NO: 232 - protein, 11 aa, Homo sapiens
  peptide 188
YLTRDSSILGP

SEQ ID NO: 233 - protein, 14 aa, Homo sapiens
  peptide 189
GGALMAHESGLKES

SEQ ID NO: 234 - protein, 14 aa, Homo sapiens
  peptide 190
AAFMIQEEYVDTVS

SEQ ID NO: 235 - protein, 14 aa, Homo sapiens
  peptide 191
APTSRSLEDLSSCP

SEQ ID NO: 236 - protein, 14 aa, Homo sapiens
  peptide 192
PLWSRYGRFLQPVD

SEQ ID NO: 237 - protein, 14 aa, Homo sapiens
  peptide 193
PQPLPSPAYPAPRP

SEQ ID NO: 238 - protein, 14 aa, Homo sapiens
  peptide 194
QLQVIFEVLEEYDW

SEQ ID NO: 239 - protein, 14 aa, Homo sapiens
  peptide 195
VIFEVLEEYDWTSF

SEQ ID NO: 240 - protein, 14 aa, Homo sapiens
  peptide 196
YTANLAAFMIQEEY

SEQ ID NO: 241 - protein, 14 aa, Homo sapiens
  peptide 197
ESQPLLGPGAGGAG

SEQ ID NO: 242 - protein, 14 aa, Homo sapiens
  peptide 198
DPQIPLAEMEALSL

SEQ ID NO: 243 - protein, 14 aa, Homo sapiens
  peptide 199
FIFIFSILGMHLFG

SEQ ID NO: 244 - protein, 11 aa, Homo sapiens
  peptide 200
KGAINFDNIGY

SEQ ID NO: 245 - protein, 14 aa, Homo sapiens
  peptide 201
NHNPWMLLYFISFL

SEQ ID NO: 246 - protein, 14 aa, Homo sapiens
  peptide 202
PCEGLGRHATFRNF

SEQ ID NO: 247 - protein, 14 aa, Homo sapiens
  peptide 203
PWMLLYFISFLLIV

SEQ ID NO: 248 - protein, 11 aa, Homo sapiens
  peptide 204
PYCARAGAGEV

SEQ ID NO: 249 - protein, 14 aa, Homo sapiens
  peptide 205
SPSLDGDGDRKKCL

SEQ ID NO: 250 - protein, 14 aa, Homo sapiens
  peptide 206
VHHLVHHHHHHHHH

SEQ ID NO: 251 - protein, 11 aa, Homo sapiens
  peptide 207
VRFLSNASTLA

SEQ ID NO: 252 - protein, 14 aa, Homo sapiens
  peptide 208
CGLDYEAYNSSSNT

SEQ ID NO: 253 - protein, 14 aa, Homo sapiens
  peptide 209
GAAGGGGDGGGGGG

SEQ ID NO: 254 - protein, 14 aa, Homo sapiens
  peptide 210
GGGGDGGGGGGGAA

SEQ ID NO: 255 - protein, 14 aa, Homo sapiens
  peptide 211
KARRAAGAAGGGGD

SEQ ID NO: 256 - protein, 14 aa, Homo sapiens
  peptide 212
RAAGAAGGGGDGGG

SEQ ID NO: 257 - protein, 14 aa, Homo sapiens
  peptide 213
YGDKTPKTWEGRLI

SEQ ID NO: 258 - protein, 14 aa, Homo sapiens
  peptide 214
FARLPPYRYRFRRR

SEQ ID NO: 259 - protein, 14 aa, Homo sapiens
  peptide 215
DFELYLVGDGKYGA

SEQ ID NO: 260 - protein, 14 aa, Homo sapiens
  peptide 216
TGRLLMNLWAIFCL

SEQ ID NO: 261 - protein, 14 aa, Homo sapiens
  peptide 217
KEETAEAEPSGPEV

SEQ ID NO: 262 - protein, 14 aa, Homo sapiens
  peptide 218
EKRLGTPPGGGGAG

SEQ ID NO: 263 - protein, 14 aa, Homo sapiens
  peptide 219
FWIIHPYSDFRFYW

SEQ ID NO: 264 - protein, 14 aa, Homo sapiens
  peptide 220
LGTPPGGGGAGAKE

SEQ ID NO: 265 - protein, 14 aa, Homo sapiens
  peptide 221
LLQDFPPDCWVSLN

SEQ ID NO: 266 - protein, 14 aa, Homo sapiens
  peptide 222
LPADMRQKIHDYYE

SEQ ID NO: 267 - protein, 14 aa, Homo sapiens
  peptide 223
MVGNLVIIPVGITF

SEQ ID NO: 268 - protein, 14 aa, Homo sapiens
  peptide 224
PSAILSPCSYTTAV

SEQ ID NO: 269 - protein, 14 aa, Homo sapiens
  peptide 225
TNLTREVRPLSASQ

SEQ ID NO: 270 - protein, 14 aa, Homo sapiens
  peptide 226
TPQPSAILSPCSYT

SEQ ID NO: 271 - protein, 14 aa, Homo sapiens
  peptide 227
YEHRYQGKIFDEEN

SEQ ID NO: 272 - protein, 14 aa, Homo sapiens
  peptide 228
IQHGVAGVITKSSK

SEQ ID NO: 273 - protein, 11 aa, Homo sapiens
  peptide 229
CGGILETTLVE

SEQ ID NO: 274 - protein, 11 aa, Homo sapiens
  peptide 230
EEEEEEEEEEE

SEQ ID NO: 275 - protein, 14 aa, Homo sapiens
  peptide 231
EEEEEEEEEEEEEE

SEQ ID NO: 276 - protein, 14 aa, Homo sapiens
  peptide 232
GADMEEEEEEEEEE

SEQ ID NO: 277 - protein, 14 aa, Homo sapiens
  peptide 233
HHGQPVWLTQIQEY

SEQ ID NO: 278 - protein, 14 aa, Homo sapiens
  peptide 234
HSSAISVVKILRVL

SEQ ID NO: 279 - protein, 11 aa, Homo sapiens
  peptide 235
IVAYGLVLHPS

SEQ ID NO: 280 - protein, 11 aa, Homo sapiens
  peptide 236
IVDIAVTEVNN

SEQ ID NO: 281 - protein, 14 aa, Homo sapiens
  peptide 237
LGMQLFGGKFNFDQ

SEQ ID NO: 282 - protein, 11 aa, Homo sapiens
  peptide 238
LPASDTGSMTE

SEQ ID NO: 283 - protein, 14 aa, Homo sapiens
  peptide 239
LYSDEESILSRFDE

SEQ ID NO: 284 - protein, 14 aa, Homo sapiens
  peptide 240
MEEDLRGYLDWITQ

SEQ ID NO: 285 - protein, 14 aa, Homo sapiens
  peptide 241
MEEEEEEEEEEEEE

SEQ ID NO: 286 - protein, 11 aa, Homo sapiens
  peptide 242
PHQYRVWATVN

SEQ ID NO: 287 - protein, 14 aa, Homo sapiens
  peptide 243
QENEGLVPGVEKEE

SEQ ID NO: 288 - protein, 14 aa, Homo sapiens
  peptide 244
SAMMALFTVSTFEG

SEQ ID NO: 289 - protein, 11 aa, Homo sapiens
  peptide 245
SHASLPASDTG

SEQ ID NO: 290 - protein, 11 aa, Homo sapiens
  peptide 246
TCDTEEEEEEG

SEQ ID NO: 291 - protein, 14 aa, Homo sapiens
  peptide 247
EGSGRVADVIAQVA

SEQ ID NO: 292 - protein, 11 aa, Homo sapiens
  peptide 248
AESLDPRPLRP

SEQ ID NO: 293 - protein, 14 aa, Homo sapiens
  peptide 249
ASVRTRKHTFGQRC

SEQ ID NO: 294 - protein, 14 aa, Homo sapiens
  peptide 250
ATFCTLLMLFIFIF

SEQ ID NO: 295 - protein, 14 aa, Homo sapiens
  peptide 251
DNVATFCTLLMLFI

SEQ ID NO: 296 - protein, 14 aa, Homo sapiens
  peptide 252
DPYEKIPHVVGEHG

SEQ ID NO: 297 - protein, 11 aa, Homo sapiens
  peptide 253
DTGDTVPDRKN

SEQ ID NO: 298 - protein, 11 aa, Homo sapiens
  peptide 254
GVPSGDPFLDG

SEQ ID NO: 299 - protein, 14 aa, Homo sapiens
  peptide 255
HAYLQSSWNLLDGL

SEQ ID NO: 300 - protein, 14 aa, Homo sapiens
  peptide 256
KRRGLYLTVPQCPL

SEQ ID NO: 301 - protein, 11 aa, Homo sapiens
  peptide 257
PGSPQRRAQQR

SEQ ID NO: 302 - protein, 14 aa, Homo sapiens
  peptide 258
AEPALGARRKKKMS

SEQ ID NO: 303 - protein, 14 aa, Homo sapiens
  peptide 259
GADEEQRVPYPALA

SEQ ID NO: 304 - protein, 14 aa, Homo sapiens
  peptide 260
AGLVLGSEHETRLV

SEQ ID NO: 305 - protein, 11 aa, Homo sapiens
  peptide 261
DEVNQIVTTNV

SEQ ID NO: 306 - protein, 14 aa, Homo sapiens
  peptide 262
GLQLIQLINVDEVN

SEQ ID NO: 307 - protein, 11 aa, Homo sapiens
  peptide 263
IQLINVDEVNQ

SEQ ID NO: 308 - protein, 11 aa, Homo sapiens
  peptide 264
YCEIIVTHFPF

SEQ ID NO: 309 - protein, 14 aa, Homo sapiens
  peptide 265
HSEENKAPESEELE

SEQ ID NO: 310 - protein, 14 aa, Homo sapiens
  peptide 266
PAKMLLDPAAPAQE

SEQ ID NO: 311 - protein, 7 aa, Homo sapiens
  peptide 267
ILIVVNA

SEQ ID NO: 312 - protein, 13 aa, Homo sapiens
  peptide 268
SHFDNGNEEWFLV

SEQ ID NO: 313 - protein, 14 aa, Homo sapiens
  peptide 269
AINCYANETCCDFF

SEQ ID NO: 314 - protein, 14 aa, Homo sapiens
  peptide 270
DNIDSQGRNCSTND

SEQ ID NO: 315 - protein, 11 aa, Homo sapiens
  peptide 271
DSQGRNCSTND

SEQ ID NO: 316 - protein, 11 aa, Homo sapiens
  peptide 272
HDVTQERDEVW

SEQ ID NO: 317 - protein, 13 aa, Homo sapiens
  peptide 273
AITSPFKYQSLLT

SEQ ID NO: 318 - protein, 13 aa, Homo sapiens
  peptide 274
IDSQGRNCSTNDS

SEQ ID NO: 319 - protein, 7 aa, Homo sapiens
  peptide 275
KYQSLLT

SEQ ID NO: 320 - protein, 13 aa, Homo sapiens
  peptide 276
NIDSQGRNCSTND

SEQ ID NO: 321 - protein, 11 aa, Homo sapiens
  peptide 277
DLIIGVFSMNL

SEQ ID NO: 322 - protein, 14 aa, Homo sapiens
  peptide 278
IGVFSMNLYTLYTV

SEQ ID NO: 323 - protein, 11 aa, Homo sapiens
  peptide 279
IVGVRTVEDGE

SEQ ID NO: 324 - protein, 14 aa, Homo sapiens
  peptide 280
KSDSCTPTNTTVEV

SEQ ID NO: 325 - protein, 11 aa, Homo sapiens
  peptide 281
MNNSTNSSNNS

SEQ ID NO: 326 - protein, 14 aa, Homo sapiens
  peptide 282
TSLGHSKDENSKQT

SEQ ID NO: 327 - protein, 7 aa, Homo sapiens
  peptide 283
MNNSTNS

SEQ ID NO: 328 - protein, 13 aa, Homo sapiens
  peptide 284
MNNSTNSSNNSLA

SEQ ID NO: 329 - protein, 13 aa, Homo sapiens
  peptide 285
NNSTNSSNNSLAL

SEQ ID NO: 330 - protein, 13 aa, Homo sapiens
  peptide 286
TQDENTVSTSLGH

SEQ ID NO: 331 - protein, 11 aa, Homo sapiens
  peptide 287
KEKKAKTLAFL

SEQ ID NO: 332 - protein, 11 aa, Homo sapiens
  peptide 288
PATELSTTEAT

SEQ ID NO: 333 - protein, 7 aa, Homo sapiens
  peptide 289
GSATQNT

SEQ ID NO: 334 - protein, 13 aa, Homo sapiens
  peptide 290
YTVYIIKGYWPLG

SEQ ID NO: 335 - protein, 11 aa, Homo sapiens
  peptide 291
APAPPPGPPRP

SEQ ID NO: 336 - protein, 11 aa, Homo sapiens
  peptide 292
ERRFLGGPARP

SEQ ID NO: 337 - protein, 14 aa, Homo sapiens
  peptide 293
NGGAAADSDSSLDE

SEQ ID NO: 338 - protein, 11 aa, Homo sapiens
  peptide 294
YNDPKCCDFVT

SEQ ID NO: 339 - protein, 13 aa, Homo sapiens
  peptide 295
AITSPFRYQSLLT

SEQ ID NO: 340 - protein, 7 aa, Homo sapiens
  peptide 296
RYQSLLT

SEQ ID NO: 341 - protein, 14 aa, Homo sapiens
  peptide 297
DYVASNASVMNLLV

SEQ ID NO: 342 - protein, 11 aa, Homo sapiens
  peptide 298
EETEETFVKAE

SEQ ID NO: 343 - protein, 11 aa, Homo sapiens
  peptide 299
GEEFSAEETEE

SEQ ID NO: 344 - protein, 11 aa, Homo sapiens
  peptide 300
LVGKRTVPLDE

SEQ ID NO: 345 - protein, 7 aa, Homo sapiens
  peptide 301
AEETEET

SEQ ID NO: 346 - protein, 13 aa, Homo sapiens
  peptide 302
AEETEETFVKAET

SEQ ID NO: 347 - protein, 13 aa, Homo sapiens
  peptide 303
CSSYPSSEDEDKP

SEQ ID NO: 348 - protein, 13 aa, Homo sapiens
  peptide 304
EETEETFVKAETE

SEQ ID NO: 349 - protein, 13 aa, Homo sapiens
  peptide 305
GEEFSAEETEETF

SEQ ID NO: 350 - protein, 13 aa, Homo sapiens
  peptide 306
LFRSCLRCPRPTL

SEQ ID NO: 351 - protein, 13 aa, Homo sapiens
  peptide 307
LGYWLCYVNSTVN

SEQ ID NO: 352 - protein, 7 aa, Homo sapiens
  peptide 308
SAEETEE

SEQ ID NO: 353 - protein, 13 aa, Homo sapiens
  peptide 309
TKAEKRKPAHRAL

SEQ ID NO: 354 - protein, 13 aa, Homo sapiens
  peptide 310
YPSSEDEDKPATD

SEQ ID NO: 355 - protein, 11 aa, Homo sapiens
  peptide 311
IYLALDVLFCT

SEQ ID NO: 356 - protein, 14 aa, Homo sapiens
  peptide 312
VATLVIPFSLANEV

SEQ ID NO: 357 - protein, 14 aa, Homo sapiens
  peptide 313
AALQGSETPGKGGG

SEQ ID NO: 358 - protein, 14 aa, Homo sapiens
  peptide 314
ETENRARELAALQG

SEQ ID NO: 359 - protein, 11 aa, Homo sapiens
  peptide 315
LVLISFKVNTE

SEQ ID NO: 360 - protein, 11 aa, Homo sapiens
  peptide 316
PRSSPNTVKRP

SEQ ID NO: 361 - protein, 11 aa, Homo sapiens
  peptide 317
QKPRGKEQLAK

SEQ ID NO: 362 - protein, 7 aa, Homo sapiens
  peptide 318
PTKKGRD

SEQ ID NO: 363 - protein, 7 aa, Homo sapiens
  peptide 319
PGALLML

SEQ ID NO: 364 - protein, 13 aa, Homo sapiens
  peptide 320
WTFIIFTSVGTLV

SEQ ID NO: 365 - protein, 11 aa, Homo sapiens
  peptide 321
VLVWVVSAAVS

SEQ ID NO: 366 - protein, 7 aa, Homo sapiens
  peptide 322
YGALVTK

SEQ ID NO: 367 - protein, 14 aa, Homo sapiens
  peptide 323
GKTRTSLKTMSRRK

SEQ ID NO: 368 - protein, 14 aa, Homo sapiens
  peptide 324
DIVAIIPYFITLGT

SEQ ID NO: 369 - protein, 14 aa, Homo sapiens
  peptide 325
ENEFQRQVWLLFEY

SEQ ID NO: 370 - protein, 14 aa, Homo sapiens
  peptide 326
EYPESSGPARIIAI

SEQ ID NO: 371 - protein, 14 aa, Homo sapiens
  peptide 327
IGVILFSSAVYFAE

SEQ ID NO: 372 - protein, 14 aa, Homo sapiens
  peptide 328
QSTSFTDPFFIVET

SEQ ID NO: 373 - protein, 14 aa, Homo sapiens
  peptide 329
QEGVNNSNEDFREE

SEQ ID NO: 374 - protein, 14 aa, Homo sapiens
  peptide 330
TWTLKKLPLSLSFL

SEQ ID NO: 375 - protein, 14 aa, Homo sapiens
  peptide 331
NNGGVSRVSPVSRG

SEQ ID NO: 376 - protein, 14 aa, Homo sapiens
  peptide 332
FRSWTYDRTEIDLV

SEQ ID NO: 377 - protein, 14 aa, Homo sapiens
  peptide 333
LDDFTPSGEWDIVA

SEQ ID NO: 378 - protein, 11 aa, Homo sapiens
  peptide 334
LPPAIYKSACK

SEQ ID NO: 379 - protein, 11 aa, Homo sapiens
  peptide 335
NVWLTQEWEDY

SEQ ID NO: 380 - protein, 14 aa, Homo sapiens
  peptide 336
RHHCARQRLRLRRR

SEQ ID NO: 381 - protein, 11 aa, Homo sapiens
  peptide 337
WTYDRTEIDLV

SEQ ID NO: 382 - protein, 11 aa, Homo sapiens
  peptide 338
AEEEEEEEEEE

SEQ ID NO: 383 - protein, 11 aa, Homo sapiens
  peptide 339
ASVASAREVNG

SEQ ID NO: 384 - protein, 11 aa, Homo sapiens
  peptide 340
DEAEEEEEEEE

SEQ ID NO: 385 - protein, 14 aa, Homo sapiens
  peptide 341
DEAEEEEEEEEEEE

SEQ ID NO: 386 - protein, 11 aa, Homo sapiens
  peptide 342
EAEEEEEEEEE

SEQ ID NO: 387 - protein, 11 aa, Homo sapiens
  peptide 343
EDEAEEEEEEE

SEQ ID NO: 388 - protein, 11 aa, Homo sapiens
  peptide 344
EEECEPQAVPV

SEQ ID NO: 389 - protein, 11 aa, Homo sapiens
  peptide 345
EEEEEEEEECE

SEQ ID NO: 390 - protein, 11 aa, Homo sapiens
  peptide 346
EEEEEEEEEEC

SEQ ID NO: 391 - protein, 14 aa, Homo sapiens
  peptide 347
EEEEEEEEEEEECE

SEQ ID NO: 392 - protein, 11 aa, Homo sapiens
  peptide 348
GQGQKEGVCGA

SEQ ID NO: 393 - protein, 11 aa, Homo sapiens
  peptide 349
LPNSGQGQKEG

SEQ ID NO: 394 - protein, 11 aa, Homo sapiens
  peptide 350
PNSGQGQKEGV

SEQ ID NO: 395 - protein, 11 aa, Homo sapiens
  peptide 351
SGQGQKEGVCG

SEQ ID NO: 396 - protein, 14 aa, Homo sapiens
  peptide 352
SPEDEAEEEEEEEE

SEQ ID NO: 397 - protein, 13 aa, Homo sapiens
  peptide 353
AALPNSGQGQKEG

SEQ ID NO: 398 - protein, 13 aa, Homo sapiens
  peptide 354
CIILTVWLIAAVI

SEQ ID NO: 399 - protein, 13 aa, Homo sapiens
  peptide 355
LPNSGQGQKEGVC

SEQ ID NO: 400 - protein, 13 aa, Homo sapiens
  peptide 356
PNSGQGQKEGVCG

SEQ ID NO: 401 - protein, 7 aa, Homo sapiens
  peptide 357
QGQKEGV

SEQ ID NO: 402 - protein, 7 aa, Homo sapiens
  peptide 358
SGQGQKE

SEQ ID NO: 403 - protein, 7 aa, Homo sapiens
  peptide 359
STGEKEE

SEQ ID NO: 404 - protein, 14 aa, Homo sapiens
  peptide 360
ACMMDLRRYPLDEQ

SEQ ID NO: 405 - protein, 14 aa, Homo sapiens
  peptide 361
EIRNETSGSEVLTS

SEQ ID NO: 406 - protein, 11 aa, Homo sapiens
  peptide 362
AQAREKRFTFV

SEQ ID NO: 407 - protein, 7 aa, Homo sapiens
  peptide 363
AAALAVA

SEQ ID NO: 408 - protein, 7 aa, Homo sapiens
  peptide 364
AVLTSRA

SEQ ID NO: 409 - protein, 13 aa, Homo sapiens
  peptide 365
RRSFKHILFRRRR

SEQ ID NO: 410 - protein, 13 aa, Homo sapiens
  peptide 366
RSFKHILFRRRRR

SEQ ID NO: 411 - protein, 7 aa, Homo sapiens
  peptide 367
DSWNNND

SEQ ID NO: 412 - protein, 13 aa, Homo sapiens
  peptide 368
LQQQSMKRSNRRK

SEQ ID NO: 413 - protein, 14 aa, Homo sapiens
  peptide 369
VVPGDHLLEPEVAD

SEQ ID NO: 414 - protein, 14 aa, Homo sapiens
  peptide 370
EEEEEEEEEEGRFY

SEQ ID NO: 415 - protein, 14 aa, Homo sapiens
  peptide 371
ESLCAKEEKCQGKG

SEQ ID NO: 416 - protein, 14 aa, Homo sapiens
  peptide 372
HCSDLMPSGSEEKI

SEQ ID NO: 417 - protein, 14 aa, Homo sapiens
  peptide 373
KKQIWLLFEYPESS

SEQ ID NO: 418 - protein, 14 aa, Homo sapiens
  peptide 374
SSSLGDKSEYLEME

SEQ ID NO: 419 - protein, 14 aa, Homo sapiens
  peptide 375
HDPQSSRGSRRRRR

SEQ ID NO: 420 - protein, 14 aa, Homo sapiens
  peptide 376
QSSRGSRRRRRQRS

SEQ ID NO: 421 - protein, 14 aa, Homo sapiens
  peptide 377
GPKEPAPKGRGAQR

SEQ ID NO: 422 - protein, 14 aa, Homo sapiens
  peptide 378
LRYFDPLRNEYFFD

SEQ ID NO: 423 - protein, 14 aa, Homo sapiens
  peptide 379
LYALCLDTSRETDL

SEQ ID NO: 424 - protein, 14 aa, Homo sapiens
  peptide 380
MAVCLLFVFSALLE

SEQ ID NO: 425 - protein, 14 aa, Homo sapiens
  peptide 381
FTMTLYLRHYWKDE

SEQ ID NO: 426 - protein, 14 aa, Homo sapiens
  peptide 382
GVDVQVESLDSISE

SEQ ID NO: 427 - protein, 14 aa, Homo sapiens
  peptide 383
WKDERLSFPSTNNL

SEQ ID NO: 428 - protein, 14 aa, Homo sapiens
  peptide 384
APQSLLTMEEIQSV

SEQ ID NO: 429 - protein, 11 aa, Homo sapiens
  peptide 385
EARPLVEFYEE

SEQ ID NO: 430 - protein, 14 aa, Homo sapiens
  peptide 386
EGEAPQSLLTMEEI

SEQ ID NO: 431 - protein, 14 aa, Homo sapiens
  peptide 387
EIQSVEETQIKERK

SEQ ID NO: 432 - protein, 14 aa, Homo sapiens
  peptide 388
FCLNHLEEARPLVE

SEQ ID NO: 433 - protein, 11 aa, Homo sapiens
  peptide 389
LEEARPLVEFY

SEQ ID NO: 434 - protein, 14 aa, Homo sapiens
  peptide 390
LLLKIRGGKQFILQ

SEQ ID NO: 435 - protein, 14 aa, Homo sapiens
  peptide 391
NHLEEARPLVEFYE

SEQ ID NO: 436 - protein, 14 aa, Homo sapiens
  peptide 392
QKYPPPLIPPRGEV

SEQ ID NO: 437 - protein, 11 aa, Homo sapiens
  peptide 393
QSLLTMEEIQS

SEQ ID NO: 438 - protein, 14 aa, Homo sapiens
  peptide 394
QVPPDLFQPYIEEI

SEQ ID NO: 439 - protein, 11 aa, Homo sapiens
  peptide 395
SDKFTRFCQWK

SEQ ID NO: 440 - protein, 14 aa, Homo sapiens
  peptide 396
SLLTMEEIQSVEET

SEQ ID NO: 441 - protein, 14 aa, Homo sapiens
  peptide 397
TVFDTINAETDRLE

SEQ ID NO: 442 - protein, 7 aa, Homo sapiens
  peptide 398
AMEKSKA

SEQ ID NO: 443 - protein, 13 aa, Homo sapiens
  peptide 399
EAPQSLLTMEEIQ

SEQ ID NO: 444 - protein, 13 aa, Homo sapiens
  peptide 400
EIQSVEETQIKER

SEQ ID NO: 445 - protein, 7 aa, Homo sapiens
  peptide 401
ETQIKER

SEQ ID NO: 446 - protein, 13 aa, Homo sapiens
  peptide 402
GEGEAPQSLLTME

SEQ ID NO: 447 - protein, 7 aa, Homo sapiens
  peptide 403
QSLLTME

SEQ ID NO: 448 - protein, 13 aa, Homo sapiens
  peptide 404
RGEGEAPQSLLTM

SEQ ID NO: 449 - protein, 7 aa, Homo sapiens
  peptide 405
SLLTMEE

SEQ ID NO: 450 - protein, 13 aa, Homo sapiens
  peptide 406
VHRIIGRGGFGEV

SEQ ID NO: 451 - protein, 13 aa, Homo sapiens
  peptide 407
WRGEGEAPQSLLT

SEQ ID NO: 452 - protein, 14 aa, Homo sapiens
  peptide 408
IMTERKAAAILALL

SEQ ID NO: 453 - protein, 14 aa, Homo sapiens
  peptide 409
LLKFSREKKAAKTL

SEQ ID NO: 454 - protein, 11 aa, Homo sapiens
  peptide 410
LLRCQCRRRRR

SEQ ID NO: 455 - protein, 14 aa, Homo sapiens
  peptide 411
LLSVSFEGPRPDSS

SEQ ID NO: 456 - protein, 14 aa, Homo sapiens
  peptide 412
LRLLRCQCRRRRRR

SEQ ID NO: 457 - protein, 11 aa, Homo sapiens
  peptide 413
RRRRRRRPLWR

SEQ ID NO: 458 - protein, 13 aa, Homo sapiens
  peptide 414
CRRRRRRRPLWRV

SEQ ID NO: 459 - protein, 13 aa, Homo sapiens
  peptide 415
LRCQCRRRRRRRP

SEQ ID NO: 460 - protein, 13 aa, Homo sapiens
  peptide 416
LRLLRCQCRRRRR

SEQ ID NO: 461 - protein, 13 aa, Homo sapiens
  peptide 417
QCRRRRRRRPLWR

SEQ ID NO: 462 - protein, 13 aa, Homo sapiens
  peptide 418
RCQCRRRRRRRPL

SEQ ID NO: 463 - protein, 13 aa, Homo sapiens
  peptide 419
RLLRCQCRRRRRR

SEQ ID NO: 464 - protein, 13 aa, Homo sapiens
  peptide 420
YPAIMTERKAAAI

SEQ ID NO: 465 - protein, 14 aa, Homo sapiens
  peptide 421
EIIPSSSKVIPLIG

SEQ ID NO: 466 - protein, 14 aa, Homo sapiens
  peptide 422
RSHVDRYFTQKEET

SEQ ID NO: 467 - protein, 11 aa, Homo sapiens
  peptide 423
LKQEWTDYRLT

SEQ ID NO: 468 - protein, 11 aa, Homo sapiens
  peptide 424
LMTPTASMDDF

SEQ ID NO: 469 - protein, 11 aa, Homo sapiens
  peptide 425
MFVCVLGTVGL

SEQ ID NO: 470 - protein, 11 aa, Homo sapiens
  peptide 426
QLSLAQLISVN

SEQ ID NO: 471 - protein, 11 aa, Homo sapiens
  peptide 427
RPATSSSQLIS

SEQ ID NO: 472 - protein, 14 aa, Homo sapiens
  peptide 428
SKSPAGSTPVAIPR

SEQ ID NO: 473 - protein, 14 aa, Homo sapiens
  peptide 429
STHTMAPWVKRCFL

SEQ ID NO: 474 - protein, 11 aa, Homo sapiens
  peptide 430
VCVLGTVGLFL

SEQ ID NO: 475 - protein, 11 aa, Homo sapiens
  peptide 431
YEVSVYTNLIV

SEQ ID NO: 476 - protein, 7 aa, Homo sapiens
  peptide 432
SEGPYAA

SEQ ID NO: 477 - protein, 14 aa, Homo sapiens
  peptide 433
AEHRLFERLFEDYN

SEQ ID NO: 478 - protein, 13 aa, Homo sapiens
  peptide 434
ERLFEDYNEIIRP

SEQ ID NO: 479 - protein, 14 aa, Homo sapiens
  peptide 435
LNQYDLLGHVVGTE

SEQ ID NO: 480 - protein, 14 aa, Homo sapiens
  peptide 436
ETKTYNSVSKVDKI

SEQ ID NO: 481 - protein, 14 aa, Homo sapiens
  peptide 437
AAKTLGIVVGCFVL

SEQ ID NO: 482 - protein, 11 aa, Homo sapiens
  peptide 438
GGSGMASAKTK

SEQ ID NO: 483 - protein, 14 aa, Homo sapiens
  peptide 439
ILLGVILGGLILFG

SEQ ID NO: 484 - protein, 11 aa, Homo sapiens
  peptide 440
TFYRISKTDGV

SEQ ID NO: 485 - protein, 11 aa, Homo sapiens
  peptide 441
YRISKTDGVCE

SEQ ID NO: 486 - protein, 13 aa, Homo sapiens
  peptide 442
DQSSCTTARVRSK

SEQ ID NO: 487 - protein, 14 aa, Homo sapiens
  peptide 443
CQCRGRGRRRRRRR

SEQ ID NO: 488 - protein, 14 aa, Homo sapiens
  peptide 444
LGCQCRGRGRRRRR

SEQ ID NO: 489 - protein, 14 aa, Homo sapiens
  peptide 445
LSLCAISIDRYIGV

SEQ ID NO: 490 - protein, 14 aa, Homo sapiens
  peptide 446
QCRGRGRRRRRRRR

SEQ ID NO: 491 - protein, 11 aa, Homo sapiens
  peptide 447
RGRGRRRRRRR

SEQ ID NO: 492 - protein, 14 aa, Homo sapiens
  peptide 448
RGRGRRRRRRRRRL

SEQ ID NO: 493 - protein, 14 aa, Homo sapiens
  peptide 449
RHDSGPLFTFKLLT

SEQ ID NO: 494 - protein, 13 aa, Homo sapiens
  peptide 450
GCQCRGRGRRRRR

SEQ ID NO: 495 - protein, 13 aa, Homo sapiens
  peptide 451
GRRRRRRRRRLGG

SEQ ID NO: 496 - protein, 13 aa, Homo sapiens
  peptide 452
RRRRRRRLGGCAY

SEQ ID NO: 497 - protein, 13 aa, Homo sapiens
  peptide 453
RRRRRRRRLGGCA

SEQ ID NO: 498 - protein, 13 aa, Homo sapiens
  peptide 454
RRRRRRRRRLGGC

SEQ ID NO: 499 - protein, 11 aa, Homo sapiens
  peptide 455
DEKNQVLTTNI

SEQ ID NO: 500 - protein, 14 aa, Homo sapiens
  peptide 456
AQEVASTLASSPPS

SEQ ID NO: 501 - protein, 14 aa, Homo sapiens
  peptide 457
GRGAQEVASTLASS

SEQ ID NO: 502 - protein, 14 aa, Homo sapiens
  peptide 458
ETAAEILKQILFMG

SEQ ID NO: 503 - protein, 14 aa, Homo sapiens
  peptide 459
GVSCVLFVIARFTP

SEQ ID NO: 504 - protein, 14 aa, Homo sapiens
  peptide 460
KPLLKEMKKGKEFY

SEQ ID NO: 505 - protein, 14 aa, Homo sapiens
  peptide 461
RIGGIFETVENEPV

SEQ ID NO: 506 - protein, 14 aa, Homo sapiens
  peptide 462
ALVTKTNRIARILA

SEQ ID NO: 507 - protein, 14 aa, Homo sapiens
  peptide 463
MEPPDIMHDYPSIR

SEQ ID NO: 508 - protein, 14 aa, Homo sapiens
  peptide 464
CEKGQIKVIRKGEV

SEQ ID NO: 509 - protein, 14 aa, Homo sapiens
  peptide 465
ANQFEGNDRYEGYC

SEQ ID NO: 510 - protein, 14 aa, Homo sapiens
  peptide 466
FNSLWFSLGAFMQQ

SEQ ID NO: 511 - protein, 14 aa, Homo sapiens
  peptide 467
GIRKIGYWNEDDKF

SEQ ID NO: 512 - protein, 14 aa, Homo sapiens
  peptide 468
HVCFITPSFPVDTS

SEQ ID NO: 513 - protein, 14 aa, Homo sapiens
  peptide 469
LTVERMVSPIESAE

SEQ ID NO: 514 - protein, 14 aa, Homo sapiens
  peptide 470
PCMSHSSGMPLGAT

SEQ ID NO: 515 - protein, 14 aa, Homo sapiens
  peptide 471
RKSKGKYAYLLEST

SEQ ID NO: 516 - protein, 14 aa, Homo sapiens
  peptide 472
ERLVVVDCESERLN

SEQ ID NO: 517 - protein, 14 aa, Homo sapiens
  peptide 473
MRSAEPSVFVRTTA

SEQ ID NO: 518 - protein, 14 aa, Homo sapiens
  peptide 474
SRAEAKRMKVAKNA

SEQ ID NO: 519 - protein, 14 aa, Homo sapiens
  peptide 475
IAVYEKMWSYMKSA

SEQ ID NO: 520 - protein, 14 aa, Homo sapiens
  peptide 476
KIAVYEKMWSYMKS

SEQ ID NO: 521 - protein, 14 aa, Homo sapiens
  peptide 477
PYEWHLEDNNEEPR

SEQ ID NO: 522 - protein, 14 aa, Homo sapiens
  peptide 478
WEKFVYLYDTERGF

SEQ ID NO: 523 - protein, 14 aa, Homo sapiens
  peptide 479
NFKPAPATNTQNYA

SEQ ID NO: 524 - protein, 14 aa, Homo sapiens
  peptide 480
RVRKSKGKFAFLLE

SEQ ID NO: 525 - protein, 14 aa, Homo sapiens
  peptide 481
LHRQNEEPVFSKDG

SEQ ID NO: 526 - protein, 14 aa, Homo sapiens
  peptide 482
LYSANTVGNFNRQC

SEQ ID NO: 527 - protein, 14 aa, Homo sapiens
  peptide 483
APSRTIPTACVRPT

SEQ ID NO: 528 - protein, 14 aa, Homo sapiens
  peptide 484
DPTDPVDYYPLLDD

SEQ ID NO: 529 - protein, 14 aa, Homo sapiens
  peptide 485
SITDPTDPVDYYPL

SEQ ID NO: 530 - protein, 11 aa, Homo sapiens
  peptide 486
DQLPPQQPLEA

SEQ ID NO: 531 - protein, 14 aa, Homo sapiens
  peptide 487
DVVLVRFGLSIAQL

SEQ ID NO: 532 - protein, 11 aa, Homo sapiens
  peptide 488
HSRVDQLDFWE

SEQ ID NO: 533 - protein, 11 aa, Homo sapiens
  peptide 489
PDQPSPCKCTC

SEQ ID NO: 534 - protein, 11 aa, Homo sapiens
  peptide 490
RVDQLDFWESG

SEQ ID NO: 535 - protein, 11 aa, Homo sapiens
  peptide 491
SAELPPPDQPS

SEQ ID NO: 536 - protein, 13 aa, Homo sapiens
  peptide 492
ELPPPDQPSPCKC

SEQ ID NO: 537 - protein, 13 aa, Homo sapiens
  peptide 493
NTHSAELPPPDQP

SEQ ID NO: 538 - protein, 13 aa, Homo sapiens
  peptide 494
PPPDQPSPCKCTC

SEQ ID NO: 539 - protein, 13 aa, Homo sapiens
  peptide 495
RIFLWMFIIVCLL

SEQ ID NO: 540 - protein, 13 aa, Homo sapiens
  peptide 496
THSAELPPPDQPS

SEQ ID NO: 541 - protein, 14 aa, Homo sapiens
  peptide 497
NMQFLLFVFLVWDP

SEQ ID NO: 542 - protein, 14 aa, Homo sapiens
  peptide 498
SVQVAPDGSRLNQY

SEQ ID NO: 543 - protein, 14 aa, Homo sapiens
  peptide 499
CALAGVLTIAMPVP

SEQ ID NO: 544 - protein, 14 aa, Homo sapiens
  peptide 500
HFDYDPRADEFFFD

SEQ ID NO: 545 - protein, 14 aa, Homo sapiens
  peptide 501
LSGLSSKAAKDVLG

SEQ ID NO: 546 - protein, 14 aa, Homo sapiens
  peptide 502
PVPVIVNNFGMYYS

SEQ ID NO: 547 - protein, 14 aa, Homo sapiens
  peptide 503
VFAHILNYYRTGKL

SEQ ID NO: 548 - protein, 14 aa, Homo sapiens
  peptide 504
WLAEPDAHSHFDYD

SEQ ID NO: 549 - protein, 14 aa, Homo sapiens
  peptide 505
CQARQFRTFHHPTY

SEQ ID NO: 550 - protein, 14 aa, Homo sapiens
  peptide 506
KDNGVTPGEKMLTV

SEQ ID NO: 551 - protein, 14 aa, Homo sapiens
  peptide 507
TYEQLTVPRRGPDE

SEQ ID NO: 552 - protein, 14 aa, Homo sapiens
  peptide 508
ERPTGWKCFVYHFA

SEQ ID NO: 553 - protein, 14 aa, Homo sapiens
  peptide 509
KCFVYHFAVFLIVL

SEQ ID NO: 554 - protein, 14 aa, Homo sapiens
  peptide 510
NFLERPTGWKCFVY

SEQ ID NO: 555 - protein, 14 aa, Homo sapiens
  peptide 511
TGWKCFVYHFAVFL

SEQ ID NO: 556 - protein, 11 aa, Homo sapiens
  peptide 512
AAAWSILQQFL

SEQ ID NO: 557 - protein, 11 aa, Homo sapiens
  peptide 513
QWREDFASNEV

SEQ ID NO: 558 - protein, 11 aa, Homo sapiens
  peptide 514
SCFQHLVQANV

SEQ ID NO: 559 - protein, 11 aa, Homo sapiens
  peptide 515
VDVSGSVSGLT

SEQ ID NO: 560 - protein, 11 aa, Homo sapiens
  peptide 516
YDVRRRPWYIQ

SEQ ID NO: 561 - protein, 14 aa, Homo sapiens
  peptide 517
LEETITQARYSETL

SEQ ID NO: 562 - protein, 14 aa, Homo sapiens
  peptide 518
GSPLPPGAPLPGPG

SEQ ID NO: 563 - protein, 14 aa, Homo sapiens
  peptide 519
PRTSAEDAPSEEVA

SEQ ID NO: 564 - protein, 14 aa, Homo sapiens
  peptide 520
APRAELVALTAVQS

SEQ ID NO: 565 - protein, 14 aa, Homo sapiens
  peptide 521
DITSDYHSPVDHED

SEQ ID NO: 566 - protein, 11 aa, Homo sapiens
  peptide 522
AAEAPEGVDPP

SEQ ID NO: 567 - protein, 11 aa, Homo sapiens
  peptide 523
CLSPTNLLRRF

SEQ ID NO: 568 - protein, 14 aa, Homo sapiens
  peptide 524
DFVVVLTGILATAG

SEQ ID NO: 569 - protein, 11 aa, Homo sapiens
  peptide 525
EMDPEERLRFA

SEQ ID NO: 570 - protein, 11 aa, Homo sapiens
  peptide 526
FIMAMIALNTV

SEQ ID NO: 571 - protein, 11 aa, Homo sapiens
  peptide 527
GPDGEPQPGLE

SEQ ID NO: 572 - protein, 11 aa, Homo sapiens
  peptide 528
GPTGCRRERER

SEQ ID NO: 573 - protein, 11 aa, Homo sapiens
  peptide 529
PGPHPQGSGSV

SEQ ID NO: 574 - protein, 11 aa, Homo sapiens
  peptide 530
QGPSPGYRMEL

SEQ ID NO: 575 - protein, 11 aa, Homo sapiens
  peptide 531
RARGGGAGGAG

SEQ ID NO: 576 - protein, 14 aa, Homo sapiens
  peptide 532
RARGGGAGGAGGPG

SEQ ID NO: 577 - protein, 11 aa, Homo sapiens
  peptide 533
RGGGAGGAGGP

SEQ ID NO: 578 - protein, 14 aa, Homo sapiens
  peptide 534
RQKSSTSLSNGGAI

SEQ ID NO: 579 - protein, 11 aa, Homo sapiens
  peptide 535
RRGPDGEPQPG

SEQ ID NO: 580 - protein, 11 aa, Homo sapiens
  peptide 536
TDAEPVGDFPC

SEQ ID NO: 581 - protein, 14 aa, Homo sapiens
  peptide 537
YKRLVRMNMPISNE

SEQ ID NO: 582 - protein, 11 aa, Homo sapiens
  peptide 538
YSEMDPEERLR

SEQ ID NO: 583 - protein, 14 aa, Homo sapiens
  peptide 539
GGERARGGGAGGAG

SEQ ID NO: 584 - protein, 11 aa, Homo sapiens
  peptide 540
ACISIVEWKPF

SEQ ID NO: 585 - protein, 11 aa, Homo sapiens
  peptide 541
AKSNPEECRGL

SEQ ID NO: 586 - protein, 11 aa, Homo sapiens
  peptide 542
ALLGNHVNHVN

SEQ ID NO: 587 - protein, 11 aa, Homo sapiens
  peptide 543
ECLRRQSSQEE

SEQ ID NO: 588 - protein, 14 aa, Homo sapiens
  peptide 544
EIRRAISCDLQDDE

SEQ ID NO: 589 - protein, 11 aa, Homo sapiens
  peptide 545
ESVNTENVSGE

SEQ ID NO: 590 - protein, 11 aa, Homo sapiens
  peptide 546
ETESVNTENVS

SEQ ID NO: 591 - protein, 14 aa, Homo sapiens
  peptide 547
GALLGNHVNHVNSD

SEQ ID NO: 592 - protein, 14 aa, Homo sapiens
  peptide 548
GLGRYARDPKFVSA

SEQ ID NO: 593 - protein, 11 aa, Homo sapiens
  peptide 549
GRYARDPKFVS

SEQ ID NO: 594 - protein, 14 aa, Homo sapiens
  peptide 550
IGVQLFKGKFYRCT

SEQ ID NO: 595 - protein, 14 aa, Homo sapiens
  peptide 551
IIVAFFMMNIFVGF

SEQ ID NO: 596 - protein, 14 aa, Homo sapiens
  peptide 552
ILLAIFANCVALAI

SEQ ID NO: 597 - protein, 11 aa, Homo sapiens
  peptide 553
LGNHVNHVNSD

SEQ ID NO: 598 - protein, 11 aa, Homo sapiens
  peptide 554
LPYVALLIAML

SEQ ID NO: 599 - protein, 14 aa, Homo sapiens
  peptide 555
LTISSEHYNQPDWL

SEQ ID NO: 600 - protein, 11 aa, Homo sapiens
  peptide 556
NLADAESLNTA

SEQ ID NO: 601 - protein, 11 aa, Homo sapiens
  peptide 557
PFPEDDSNSTN

SEQ ID NO: 602 - protein, 14 aa, Homo sapiens
  peptide 558
SETESVNTENVSGE

SEQ ID NO: 603 - protein, 14 aa, Homo sapiens
  peptide 559
TSMPTSETESVNTE

SEQ ID NO: 604 - protein, 14 aa, Homo sapiens
  peptide 560
FVIVTFQEQGEKEY

SEQ ID NO: 605 - protein, 14 aa, Homo sapiens
  peptide 561
PFPEDDSNSTNHNL

SEQ ID NO: 606 - protein, 14 aa, Homo sapiens
  peptide 562
SRRWRRWNRFNRRR

SEQ ID NO: 607 - protein, 14 aa, Homo sapiens
  peptide 563
WSEYDPEAKGRIKH

SEQ ID NO: 608 - protein, 11 aa, Homo sapiens
  peptide 564
ARQGSWEDEEE

SEQ ID NO: 609 - protein, 11 aa, Homo sapiens
  peptide 565
EDEEEDYEEEL

SEQ ID NO: 610 - protein, 11 aa, Homo sapiens
  peptide 566
EEEDYEEELTD

SEQ ID NO: 611 - protein, 11 aa, Homo sapiens
  peptide 567
GDNSSSSLGDV

SEQ ID NO: 612 - protein, 11 aa, Homo sapiens
  peptide 568
LGRNKNELEGW

SEQ ID NO: 613 - protein, 11 aa, Homo sapiens
  peptide 569
NSAYTELGDSC

SEQ ID NO: 614 - protein, 11 aa, Homo sapiens
  peptide 570
PGSRNSAYTEL

SEQ ID NO: 615 - protein, 11 aa, Homo sapiens
  peptide 571
QGSWEDEEEDY

SEQ ID NO: 616 - protein, 11 aa, Homo sapiens
  peptide 572
SQEIPMEVFDP

SEQ ID NO: 617 - protein, 11 aa, Homo sapiens
  peptide 573
SRNSAYTELGD

SEQ ID NO: 618 - protein, 14 aa, Homo sapiens
  peptide 574
SRNSAYTELGDSCV

SEQ ID NO: 619 - protein, 11 aa, Homo sapiens
  peptide 575
SWEDEEEDYEE

SEQ ID NO: 620 - protein, 11 aa, Homo sapiens
  peptide 576
YNPSPGDEVPV

SEQ ID NO: 621 - protein, 14 aa, Homo sapiens
  peptide 577
YPPSQEIPMEVFDP

SEQ ID NO: 622 - protein, 14 aa, Homo sapiens
  peptide 578
CPADVCGPLFEEEL

SEQ ID NO: 623 - protein, 14 aa, Homo sapiens
  peptide 579
ITSVHFRREVETEP

SEQ ID NO: 624 - protein, 14 aa, Homo sapiens
  peptide 580
NKPPSKTCLKEEMA

SEQ ID NO: 625 - protein, 11 aa, Homo sapiens
  peptide 581
DDFGGIETLRV

SEQ ID NO: 626 - protein, 14 aa, Homo sapiens
  peptide 582
GKTINKIDIDTEAY

SEQ ID NO: 627 - protein, 11 aa, Homo sapiens
  peptide 583
SLNEKEETLTT

SEQ ID NO: 628 - protein, 14 aa, Homo sapiens
  peptide 584
KIQLNATSVTHKPN

SEQ ID NO: 629 - protein, 14 aa, Homo sapiens
  peptide 585
PFGRFKVNSEEEEE

SEQ ID NO: 630 - protein, 14 aa, Homo sapiens
  peptide 586
VPPYSHQSSVWFEM

SEQ ID NO: 631 - protein, 14 aa, Homo sapiens
  peptide 587
IPCLGLSFLTVLVF

SEQ ID NO: 632 - protein, 11 aa, Homo sapiens
  peptide 588
IVTVFVINVHH

SEQ ID NO: 633 - protein, 11 aa, Homo sapiens
  peptide 589
CLFVVTPVMVV

SEQ ID NO: 634 - protein, 11 aa, Homo sapiens
  peptide 590
GANFIVNHMRD

SEQ ID NO: 635 - protein, 11 aa, Homo sapiens
  peptide 591
NQPPPQPFPGD

SEQ ID NO: 636 - protein, 11 aa, Homo sapiens
  peptide 592
PPPQPFPGDPY

SEQ ID NO: 637 - protein, 13 aa, Homo sapiens
  peptide 593
CLFVVTPVMVVGT

SEQ ID NO: 638 - protein, 14 aa, Homo sapiens
  peptide 594
DVSLEEDREAVRRE

SEQ ID NO: 639 - protein, 11 aa, Homo sapiens
  peptide 595
EKFNNDWWIGR

SEQ ID NO: 640 - protein, 14 aa, Homo sapiens
  peptide 596
HTPPYDVVPSMRPV

SEQ ID NO: 641 - protein, 14 aa, Homo sapiens
  peptide 597
YVEPKEDYSHDHVD

SEQ ID NO: 642 - protein, 14 aa, Homo sapiens
  peptide 598
TTVIYNSNIFTDPF

SEQ ID NO: 643 - protein, 14 aa, Homo sapiens
  peptide 599
IAEQEGNQKGEQAT

SEQ ID NO: 644 - protein, 14 aa, Homo sapiens
  peptide 600
FMACEELPPGAPEL

SEQ ID NO: 645 - protein, 14 aa, Homo sapiens
  peptide 601
GESPSSGPSSPESS

SEQ ID NO: 646 - protein, 14 aa, Homo sapiens
  peptide 602
LRLVRVARKLDRYS

SEQ ID NO: 647 - protein, 14 aa, Homo sapiens
  peptide 603
KFSYIPEAKASCYG

SEQ ID NO: 648 - protein, 14 aa, Homo sapiens
  peptide 604
LLVLPALLVWRGPA

SEQ ID NO: 649 - protein, 14 aa, Homo sapiens
  peptide 605
NSTNEGMNVKKCCK

SEQ ID NO: 650 - protein, 14 aa, Homo sapiens
  peptide 606
PSFTIGKAIWLLWG

SEQ ID NO: 651 - protein, 14 aa, Homo sapiens
  peptide 607
PSGLISVSYDDWDY

SEQ ID NO: 652 - protein, 14 aa, Homo sapiens
  peptide 608
LRISRQHSYDNIVD

SEQ ID NO: 653 - protein, 14 aa, Homo sapiens
  peptide 609
HSYDNIVDKPRELD

SEQ ID NO: 654 - protein, 14 aa, Homo sapiens
  peptide 610
KLSGKKSSLFPQGL

SEQ ID NO: 655 - protein, 14 aa, Homo sapiens
  peptide 611
MSLIKEAHWEGLTG

SEQ ID NO: 656 - protein, 14 aa, Homo sapiens
  peptide 612
IPVSFEWSNDSSVI

SEQ ID NO: 657 - protein, 14 aa, Homo sapiens
  peptide 613
SDRTPVVSSFLDNT

SEQ ID NO: 658 - protein, 14 aa, Homo sapiens
  peptide 614
TIKDEAENAFLLEE

SEQ ID NO: 659 - protein, 14 aa, Homo sapiens
  peptide 615
AMALSLITFICEHL

SEQ ID NO: 660 - protein, 14 aa, Homo sapiens
  peptide 616
APWEKNLTNVEWED

SEQ ID NO: 661 - protein, 14 aa, Homo sapiens
  peptide 617
ASVMLNIMEEYDWY

SEQ ID NO: 662 - protein, 14 aa, Homo sapiens
  peptide 618
EGNAAKRRKQQYKD

SEQ ID NO: 663 - protein, 14 aa, Homo sapiens
  peptide 619
ETEEQEDDHLSIVT

SEQ ID NO: 664 - protein, 14 aa, Homo sapiens
  peptide 620
FPTGLISVSYDEWD

SEQ ID NO: 665 - protein, 14 aa, Homo sapiens
  peptide 621
GVPAPWEKNLTNVE

SEQ ID NO: 666 - protein, 14 aa, Homo sapiens
  peptide 622
HMFEMSAGESTFAN

SEQ ID NO: 667 - protein, 14 aa, Homo sapiens
  peptide 623
IENSFVGWELEEVL

SEQ ID NO: 668 - protein, 14 aa, Homo sapiens
  peptide 624
QFGPSIEQQASVML

SEQ ID NO: 669 - protein, 14 aa, Homo sapiens
  peptide 625
SRREFDEIELAYRR

SEQ ID NO: 670 - protein, 14 aa, Homo sapiens
  peptide 626
RERLPKARVVVCFC

SEQ ID NO: 671 - protein, 14 aa, Homo sapiens
  peptide 627
SAMCYSALVTKTNR

SEQ ID NO: 672 - protein, 14 aa, Homo sapiens
  peptide 628
ADFPGDDEEDEPEI

SEQ ID NO: 673 - protein, 11 aa, Homo sapiens
  peptide 629
DIVATVENEEP

SEQ ID NO: 674 - protein, 11 aa, Homo sapiens
  peptide 630
FIGTDIVATVE

SEQ ID NO: 675 - protein, 11 aa, Homo sapiens
  peptide 631
GSLDQHQGSQE

SEQ ID NO: 676 - protein, 11 aa, Homo sapiens
  peptide 632
GTDIVATVENE

SEQ ID NO: 677 - protein, 11 aa, Homo sapiens
  peptide 633
IDEFESNVNEV

SEQ ID NO: 678 - protein, 14 aa, Homo sapiens
  peptide 634
KLCDPESDYAPGEE

SEQ ID NO: 679 - protein, 14 aa, Homo sapiens
  peptide 635
KLMAFKARGYFGDP

SEQ ID NO: 680 - protein, 14 aa, Homo sapiens
  peptide 636
LLIQKALVRGGLGT

SEQ ID NO: 681 - protein, 11 aa, Homo sapiens
  peptide 637
TDLSKMTEEEC

SEQ ID NO: 682 - protein, 14 aa, Homo sapiens
  peptide 638
TGQALADACQMEPE

SEQ ID NO: 683 - protein, 14 aa, Homo sapiens
  peptide 639
TSMKLLDQVIPPIG

SEQ ID NO: 684 - protein, 14 aa, Homo sapiens
  peptide 640
YPSADFPGDDEEDE

SEQ ID NO: 685 - protein, 14 aa, Homo sapiens
  peptide 641
DIVATVENEEPSPC

SEQ ID NO: 686 - protein, 14 aa, Homo sapiens
  peptide 642
PDKSEEEKSTMAKK

SEQ ID NO: 687 - protein, 14 aa, Homo sapiens
  peptide 643
AAIDAARQAKLMGS

SEQ ID NO: 688 - protein, 14 aa, Homo sapiens
  peptide 644
DAARQAKLMGSAGN

SEQ ID NO: 689 - protein, 14 aa, Homo sapiens
  peptide 645
EGLGQFAQDPKFIE

SEQ ID NO: 690 - protein, 14 aa, Homo sapiens
  peptide 646
GQFAQDPKFIEVTT

SEQ ID NO: 691 - protein, 11 aa, Homo sapiens
  peptide 647
GWPPQPVPTLR

SEQ ID NO: 692 - protein, 14 aa, Homo sapiens
  peptide 648
GWPPQPVPTLRLEG

SEQ ID NO: 693 - protein, 11 aa, Homo sapiens
  peptide 649
IVTFQEQGEQE

SEQ ID NO: 694 - protein, 11 aa, Homo sapiens
  peptide 650
LETGHGRQCQN

SEQ ID NO: 695 - protein, 14 aa, Homo sapiens
  peptide 651
LRRDSGSAGTQAHC

SEQ ID NO: 696 - protein, 11 aa, Homo sapiens
  peptide 652
PPQPVPTLRLE

SEQ ID NO: 697 - protein, 11 aa, Homo sapiens
  peptide 653
QDPKFIEVTTQ

SEQ ID NO: 698 - protein, 11 aa, Homo sapiens
  peptide 654
QPVPTLRLEGV

SEQ ID NO: 699 - protein, 11 aa, Homo sapiens
  peptide 655
SMNAEENSRIS

SEQ ID NO: 700 - protein, 11 aa, Homo sapiens
  peptide 656
VACKRLVSMNM

SEQ ID NO: 701 - protein, 11 aa, Homo sapiens
  peptide 657
YPSTVSTVEGH

SEQ ID NO: 702 - protein, 14 aa, Homo sapiens
  peptide 658
PRPAGYPSTVSTVE

SEQ ID NO: 703 - protein, 14 aa, Homo sapiens
  peptide 659
YIPFPEDDSNATNS

SEQ ID NO: 704 - protein, 14 aa, Homo sapiens
  peptide 660
FPEDDSNATNSNLE

SEQ ID NO: 705 - protein, 14 aa, Homo sapiens
  peptide 661
LLYRSIDSHTEDKG

SEQ ID NO: 706 - protein, 14 aa, Homo sapiens
  peptide 662
CPAIDQPAMSPEDK

SEQ ID NO: 707 - protein, 14 aa, Homo sapiens
  peptide 663
ENITNVEVETEPFL

SEQ ID NO: 708 - protein, 14 aa, Homo sapiens
  peptide 664
ESPPPPPLPPQQQQ

SEQ ID NO: 709 - protein, 14 aa, Homo sapiens
  peptide 665
HEDCPAIDQPAMSP

SEQ ID NO: 710 - protein, 14 aa, Homo sapiens
  peptide 666
IPGAPPENITNVEV

SEQ ID NO: 711 - protein, 14 aa, Homo sapiens
  peptide 667
PNYCKPDPPPPPPP

SEQ ID NO: 712 - protein, 14 aa, Homo sapiens
  peptide 668
ERIGADPDDILGSN

SEQ ID NO: 713 - protein, 14 aa, Homo sapiens
  peptide 669
VKSVQPGEVCCWLC

SEQ ID NO: 714 - protein, 14 aa, Homo sapiens
  peptide 670
AEKDEDDTKFKSIP

SEQ ID NO: 715 - protein, 14 aa, Homo sapiens
  peptide 671
FPGPCTWRRISSLE

SEQ ID NO: 716 - protein, 14 aa, Homo sapiens
  peptide 672
FVAYCSREEAEVLF

SEQ ID NO: 717 - protein, 14 aa, Homo sapiens
  peptide 673
GIVFEDNVDTEAVA

SEQ ID NO: 718 - protein, 14 aa, Homo sapiens
  peptide 674
KRVRGVWNGMIGEV

SEQ ID NO: 719 - protein, 14 aa, Homo sapiens
  peptide 675
LAAFMIQEQYIDTV

SEQ ID NO: 720 - protein, 14 aa, Homo sapiens
  peptide 676
PATFPVGLISVVTE

SEQ ID NO: 721 - protein, 14 aa, Homo sapiens
  peptide 677
PCTWRRISSLESEV

SEQ ID NO: 722 - protein, 14 aa, Homo sapiens
  peptide 678
PLEIQPLTVGVNTT

SEQ ID NO: 723 - protein, 14 aa, Homo sapiens
  peptide 679
LEIQPLTVGVNTTN

SEQ ID NO: 724 - protein, 11 aa, Homo sapiens
  peptide 680
VEEEDRWACAG

SEQ ID NO: 725 - protein, 11 aa, Homo sapiens
  peptide 681
GSWTYDKAEID

SEQ ID NO: 726 - protein, 11 aa, Homo sapiens
  peptide 682
IGSKVDMNDFW

SEQ ID NO: 727 - protein, 11 aa, Homo sapiens
  peptide 683
KSSCPMDITFF

SEQ ID NO: 728 - protein, 11 aa, Homo sapiens
  peptide 684
QLANVDEVNQI

SEQ ID NO: 729 - protein, 11 aa, Homo sapiens
  peptide 685
SKVDMNDFWEN

SEQ ID NO: 730 - protein, 14 aa, Homo sapiens
  peptide 686
YNCCEEIYTDITYS

SEQ ID NO: 731 - protein, 11 aa, Homo sapiens
  peptide 687
APMFQRMEPSS

SEQ ID NO: 732 - protein, 11 aa, Homo sapiens
  peptide 688
EEETLTFEAAV

SEQ ID NO: 733 - protein, 14 aa, Homo sapiens
  peptide 689
GSAPPLRHSWQMPN

SEQ ID NO: 734 - protein, 11 aa, Homo sapiens
  peptide 690
GTNKGRDIKTI

SEQ ID NO: 735 - protein, 14 aa, Homo sapiens
  peptide 691
HRACFMNNSGILEG

SEQ ID NO: 736 - protein, 11 aa, Homo sapiens
  peptide 692
ITMEGWTTVLY

SEQ ID NO: 737 - protein, 11 aa, Homo sapiens
  peptide 693
KNAPMFQRMEP

SEQ ID NO: 738 - protein, 14 aa, Homo sapiens
  peptide 694
MMKYYSAPCTYELA

SEQ ID NO: 739 - protein, 11 aa, Homo sapiens
  peptide 695
QCITMEGWTTV

SEQ ID NO: 740 - protein, 14 aa, Homo sapiens
  peptide 696
QELTKDEQEEEEAF

SEQ ID NO: 741 - protein, 11 aa, Homo sapiens
  peptide 697
QQEAGGGEAVV

SEQ ID NO: 742 - protein, 14 aa, Homo sapiens
  peptide 698
RERGRSKERKHLLS

SEQ ID NO: 743 - protein, 14 aa, Homo sapiens
  peptide 699
SPLKEAEIREDEEE

SEQ ID NO: 744 - protein, 14 aa, Homo sapiens
  peptide 700
TDPSSMRRSFSTIR

SEQ ID NO: 745 - protein, 14 aa, Homo sapiens
  peptide 701
PMRLVNFPMDGHAC

SEQ ID NO: 746 - protein, 11 aa, Homo sapiens
  peptide 702
ALSRGHGKYFF

SEQ ID NO: 747 - protein, 11 aa, Homo sapiens
  peptide 703
DGAHGLLDPYN

SEQ ID NO: 748 - protein, 11 aa, Homo sapiens
  peptide 704
ESLNKVFVDNF

SEQ ID NO: 749 - protein, 14 aa, Homo sapiens
  peptide 705
IMLITDGAVDTYDT

SEQ ID NO: 750 - protein, 11 aa, Homo sapiens
  peptide 706
PELRLLYEEGK

SEQ ID NO: 751 - protein, 11 aa, Homo sapiens
  peptide 707
PGIKWEPDENG

SEQ ID NO: 752 - protein, 11 aa, Homo sapiens
  peptide 708
TIAKQTVSSIL

SEQ ID NO: 753 - protein, 11 aa, Homo sapiens
  peptide 709
TTVAMPVFSKQ

SEQ ID NO: 754 - protein, 14 aa, Homo sapiens
  peptide 710
VDKGKRVLVMTNDY

SEQ ID NO: 755 - protein, 14 aa, Homo sapiens
  peptide 711
RIAKIDSYSRIFFP

SEQ ID NO: 756 - protein, 14 aa, Homo sapiens
  peptide 712
KFRSARYSRSLSTE

SEQ ID NO: 757 - protein, 14 aa, Homo sapiens
  peptide 713
RTFEEPTSSLAAQI

SEQ ID NO: 758 - protein, 14 aa, Homo sapiens
  peptide 714
FIMDKALLDYEVSI

SEQ ID NO: 759 - protein, 14 aa, Homo sapiens
  peptide 715
IPSTMNCMEVETTN

SEQ ID NO: 760 - protein, 14 aa, Homo sapiens
  peptide 716
QRLHRAINTSFIEE

SEQ ID NO: 761 - protein, 14 aa, Homo sapiens
  peptide 717
DAFIMDKALLDYEV

SEQ ID NO: 762 - protein, 14 aa, Homo sapiens
  peptide 718
KTKRVEKRSNVGPR

SEQ ID NO: 763 - protein, 14 aa, Homo sapiens
  peptide 719
ETECFFVEPDEPFH

SEQ ID NO: 764 - protein, 11 aa, Homo sapiens
  peptide 720
GGGGGGGGGAG

SEQ ID NO: 765 - protein, 14 aa, Homo sapiens
  peptide 721
GLAGAGGGGGGAVG

SEQ ID NO: 766 - protein, 11 aa, Homo sapiens
  peptide 722
SNIIGVIVYIS

SEQ ID NO: 767 - protein, 14 aa, Homo sapiens
  peptide 723
VAAGLAGAGGGGGG

SEQ ID NO: 768 - protein, 14 aa, Homo sapiens
  peptide 724
RLPSYRFRYRRRSR

SEQ ID NO: 769 - protein, 14 aa, Homo sapiens
  peptide 725
FSSRERRSFTEIDT

SEQ ID NO: 770 - protein, 14 aa, Homo sapiens
  peptide 726
KEQMNEELRREAET

SEQ ID NO: 771 - protein, 14 aa, Homo sapiens
  peptide 727
RSFTEIDTGDDEDF

SEQ ID NO: 772 - protein, 14 aa, Homo sapiens
  peptide 728
SADDNHLSPSRWKW

SEQ ID NO: 773 - protein, 14 aa, Homo sapiens
  peptide 729
VCDDYNLNENEYFF

SEQ ID NO: 774 - protein, 14 aa, Homo sapiens
  peptide 730
CDDYDEAAREFYFD

SEQ ID NO: 775 - protein, 14 aa, Homo sapiens
  peptide 731
LRSLGATLKHSYRE

SEQ ID NO: 776 - protein, 14 aa, Homo sapiens
  peptide 732
VSEASLETSRETSQ

SEQ ID NO: 777 - protein, 14 aa, Homo sapiens
  peptide 733
VYCSDGFCELAGFA

SEQ ID NO: 778 - protein, 14 aa, Homo sapiens
  peptide 734
IRVSRSNSPKTKQE

SEQ ID NO: 779 - protein, 14 aa, Homo sapiens
  peptide 735
SPICTRGSSSRNKK

SEQ ID NO: 780 - protein, 14 aa, Homo sapiens
  peptide 736
TLPGTRLALLASSE

SEQ ID NO: 781 - protein, 14 aa, Homo sapiens
  peptide 737
LEGKANGGLVDGEV

SEQ ID NO: 782 - protein, 11 aa, Homo sapiens
  peptide 738
CGPSVRPVPAW

SEQ ID NO: 783 - protein, 11 aa, Homo sapiens
  peptide 739
DRFFLAIFFSM

SEQ ID NO: 784 - protein, 11 aa, Homo sapiens
  peptide 740
FFLAIFFSMAL

SEQ ID NO: 785 - protein, 14 aa, Homo sapiens
  peptide 741
QSRPPELSPSPQSP

SEQ ID NO: 786 - protein, 11 aa, Homo sapiens
  peptide 742
RPPELSPSPQS

SEQ ID NO: 787 - protein, 7 aa, Homo sapiens
  peptide 743
LSPSPQS

SEQ ID NO: 788 - protein, 7 aa, Homo sapiens
  peptide 744
LYLWIRQ

SEQ ID NO: 789 - protein, 14 aa, Homo sapiens
  peptide 745
QGHASYILEAPASN

SEQ ID NO: 790 - protein, 14 aa, Homo sapiens
  peptide 746
GSQNSMGAGPCAPG

SEQ ID NO: 791 - protein, 14 aa, Homo sapiens
  peptide 747
LGPQFPSKGYSLLG

SEQ ID NO: 792 - protein, 14 aa, Homo sapiens
  peptide 748
YSAAFLLSDQDESR

SEQ ID NO: 793 - protein, 14 aa, Homo sapiens
  peptide 749
KDRTHNVTEKVTQV

SEQ ID NO: 794 - protein, 14 aa, Homo sapiens
  peptide 750
ENSTNDPEDSADTI

SEQ ID NO: 795 - protein, 14 aa, Homo sapiens
  peptide 751
GEKENSTNDPEDSA

SEQ ID NO: 796 - protein, 14 aa, Homo sapiens
  peptide 752
RECGYSCSPLNVVD

SEQ ID NO: 797 - protein, 14 aa, Homo sapiens
  peptide 753
YSEYGAAVLMLLMC

SEQ ID NO: 798 - protein, 14 aa, Homo sapiens
  peptide 754
SRPDVMQKPCTCDF

SEQ ID NO: 799 - protein, 11 aa, Homo sapiens
  peptide 755
GRRTLRPAVVG

SEQ ID NO: 800 - protein, 11 aa, Homo sapiens
  peptide 756
LDFLDAELEDE

SEQ ID NO: 801 - protein, 14 aa, Homo sapiens
  peptide 757
LDNHGYVFKPPHQD

SEQ ID NO: 802 - protein, 11 aa, Homo sapiens
  peptide 758
RTLRPAVVGVK

SEQ ID NO: 803 - protein, 11 aa, Homo sapiens
  peptide 759
RTLVKSLDERY

SEQ ID NO: 804 - protein, 11 aa, Homo sapiens
  peptide 760
TRRPTSGPPRP

SEQ ID NO: 805 - protein, 14 aa, Homo sapiens
  peptide 761
VTLDFLDAELEDEN

SEQ ID NO: 806 - protein, 14 aa, Homo sapiens
  peptide 762
REYCKDLNASDNNT

SEQ ID NO: 807 - protein, 14 aa, Homo sapiens
  peptide 763
LYGLIYHSWFQADP

SEQ ID NO: 808 - protein, 14 aa, Homo sapiens
  peptide 764
DFFYHPETQQYFFD

SEQ ID NO: 809 - protein, 14 aa, Homo sapiens
  peptide 765
LIPEIIGDCCYEEY

SEQ ID NO: 810 - protein, 14 aa, Homo sapiens
  peptide 766
RYPDTLLGSSERDF

SEQ ID NO: 811 - protein, 14 aa, Homo sapiens
  peptide 767
VTMTTLGYGDMVPK

SEQ ID NO: 812 - protein, 14 aa, Homo sapiens
  peptide 768
ANRSYSDEDQSSSN

SEQ ID NO: 813 - protein, 11 aa, Homo sapiens
  peptide 769
DATPHTLVQPI

SEQ ID NO: 814 - protein, 11 aa, Homo sapiens
  peptide 770
DNGIMGCHEIP

SEQ ID NO: 815 - protein, 11 aa, Homo sapiens
  peptide 771
DRGEDEEEIDY

SEQ ID NO: 816 - protein, 11 aa, Homo sapiens
  peptide 772
ELGKEEEEEEQ

SEQ ID NO: 817 - protein, 11 aa, Homo sapiens
  peptide 773
FYHCLGVDTRN

SEQ ID NO: 818 - protein, 11 aa, Homo sapiens
  peptide 774
GGAGGGGAGSE

SEQ ID NO: 819 - protein, 11 aa, Homo sapiens
  peptide 775
GKFYHCLGVDT

SEQ ID NO: 820 - protein, 11 aa, Homo sapiens
  peptide 776
GMHIFGCKFSL

SEQ ID NO: 821 - protein, 14 aa, Homo sapiens
  peptide 777
GRGGAGGGGAGSEH

SEQ ID NO: 822 - protein, 14 aa, Homo sapiens
  peptide 778
LFKGKFYHCLGVDT

SEQ ID NO: 823 - protein, 11 aa, Homo sapiens
  peptide 779
NRVPSMRILVN

SEQ ID NO: 824 - protein, 11 aa, Homo sapiens
  peptide 780
QEVQLAETEAF

SEQ ID NO: 825 - protein, 11 aa, Homo sapiens
  peptide 781
QPIPATLASDP

SEQ ID NO: 826 - protein, 11 aa, Homo sapiens
  peptide 782
RQATGSDTSLD

SEQ ID NO: 827 - protein, 14 aa, Homo sapiens
  peptide 783
RQATGSDTSLDASP

SEQ ID NO: 828 - protein, 11 aa, Homo sapiens
  peptide 784
SLRGLRAHQRS

SEQ ID NO: 829 - protein, 11 aa, Homo sapiens
  peptide 785
SMRILVNLLLD

SEQ ID NO: 830 - protein, 14 aa, Homo sapiens
  peptide 786
SPSSSAGSLQTTLE

SEQ ID NO: 831 - protein, 11 aa, Homo sapiens
  peptide 787
TAVSPDPENFL

SEQ ID NO: 832 - protein, 14 aa, Homo sapiens
  peptide 788
TGSDTSLDASPSSS

SEQ ID NO: 833 - protein, 14 aa, Homo sapiens
  peptide 789
LVQPIPATLASDPA

SEQ ID NO: 834 - protein, 14 aa, Homo sapiens
  peptide 790
PYARMPSYRYRRRR

SEQ ID NO: 835 - protein, 14 aa, Homo sapiens
  peptide 791
RMPSYRYRRRRSRS

SEQ ID NO: 836 - protein, 14 aa, Homo sapiens
  peptide 792
EWEVHGMPAVKNVI

SEQ ID NO: 837 - protein, 11 aa, Homo sapiens
  peptide 793
LSDFIEDVEWE

SEQ ID NO: 838 - protein, 14 aa, Homo sapiens
  peptide 794
VLNVTLQITLSQIK

SEQ ID NO: 839 - protein, 14 aa, Homo sapiens
  peptide 795
VLYNKADDESSEPV

SEQ ID NO: 840 - protein, 7 aa, Homo sapiens
  peptide 796
DESSEPV

SEQ ID NO: 841 - protein, 13 aa, Homo sapiens
  peptide 797
LLLKRRSSFYIVN

SEQ ID NO: 842 - protein, 13 aa, Homo sapiens
  peptide 798
TFGSWTYNGNQVD

SEQ ID NO: 843 - protein, 14 aa, Homo sapiens
  peptide 799
AIRNGVNRNSAIIG

SEQ ID NO: 844 - protein, 14 aa, Homo sapiens
  peptide 800
GDNSDYDYSALSCT

SEQ ID NO: 845 - protein, 14 aa, Homo sapiens
  peptide 801
QPEDRRRRIIINVG

SEQ ID NO: 846 - protein, 14 aa, Homo sapiens
  peptide 802
SDYDYSALSCTSDA

SEQ ID NO: 847 - protein, 14 aa, Homo sapiens
  peptide 803
TREFGLLLLFLCVA

SEQ ID NO: 848 - protein, 14 aa, Homo sapiens
  peptide 804
FHTFSRSYSELKEQ

SEQ ID NO: 849 - protein, 14 aa, Homo sapiens
  peptide 805
RLRACRGHDDLLRV

SEQ ID NO: 850 - protein, 14 aa, Homo sapiens
  peptide 806
RVCDDYDVSRDEFF

SEQ ID NO: 851 - protein, 14 aa, Homo sapiens
  peptide 807
LGAGGGSAEVDTSS

SEQ ID NO: 852 - protein, 14 aa, Homo sapiens
  peptide 808
PDLSPRVVDGIEDG

SEQ ID NO: 853 - protein, 14 aa, Homo sapiens
  peptide 809
TAPRPRLGGRGRPG

SEQ ID NO: 854 - protein, 14 aa, Homo sapiens
  peptide 810
SAMRSCDFGDGMKE

SEQ ID NO: 855 - protein, 14 aa, Homo sapiens
  peptide 811
RSCDFGDGMKEVPS

SEQ ID NO: 856 - protein, 14 aa, Homo sapiens
  peptide 812
ILKFQVQREVNSYL

SEQ ID NO: 857 - protein, 14 aa, Homo sapiens
  peptide 813
QPRRHRRPRRVIAR

SEQ ID NO: 858 - protein, 14 aa, Homo sapiens
  peptide 814
DLSPRIVDGIEDSG

SEQ ID NO: 859 - protein, 14 aa, Homo sapiens
  peptide 815
IEDSGSTAEAPSFR

SEQ ID NO: 860 - protein, 14 aa, Homo sapiens
  peptide 816
DKTLPSITEAESGA

SEQ ID NO: 861 - protein, 14 aa, Homo sapiens
  peptide 817
ASPVGIKGFNTLPS

SEQ ID NO: 862 - protein, 11 aa, Homo sapiens
  peptide 818
LAVHMFIDRHK

SEQ ID NO: 863 - protein, 14 aa, Homo sapiens
  peptide 819
DASPVGIKGFNTLP

SEQ ID NO: 864 - protein, 14 aa, Homo sapiens
  peptide 820
AVNFNGSAGTPVTF

SEQ ID NO: 865 - protein, 14 aa, Homo sapiens
  peptide 821
CEGYNYQVDELSCE

SEQ ID NO: 866 - protein, 14 aa, Homo sapiens
  peptide 822
CSRDTYALEQSLTF

SEQ ID NO: 867 - protein, 14 aa, Homo sapiens
  peptide 823
ESGVEAFTQISREI

SEQ ID NO: 868 - protein, 14 aa, Homo sapiens
  peptide 824
FNGSAGTPVTFNEN

SEQ ID NO: 869 - protein, 14 aa, Homo sapiens
  peptide 825
GHFLWIGSDSWGSK

SEQ ID NO: 870 - protein, 14 aa, Homo sapiens
  peptide 826
IAQSQKIPREPRPG

SEQ ID NO: 871 - protein, 14 aa, Homo sapiens
  peptide 827
IFEQGKKSVTAPKF

SEQ ID NO: 872 - protein, 14 aa, Homo sapiens
  peptide 828
ILPKRASIDGFDRY

SEQ ID NO: 873 - protein, 14 aa, Homo sapiens
  peptide 829
KLIQKGNDRPNGEV

SEQ ID NO: 874 - protein, 14 aa, Homo sapiens
  peptide 830
KSVTAPKFISPASQ

SEQ ID NO: 875 - protein, 14 aa, Homo sapiens
  peptide 831
NNRRNVWFAEFWEE

SEQ ID NO: 876 - protein, 14 aa, Homo sapiens
  peptide 832
NQSGHFLWIGSDSW

SEQ ID NO: 877 - protein, 14 aa, Homo sapiens
  peptide 833
QGKKSVTAPKFISP

SEQ ID NO: 878 - protein, 14 aa, Homo sapiens
  peptide 834
RMSTIDGKELLGYI

SEQ ID NO: 879 - protein, 14 aa, Homo sapiens
  peptide 835
IDQINKDPDLLSNI

SEQ ID NO: 880 - protein, 14 aa, Homo sapiens
  peptide 836
QSAEKMYIQTTTLT

SEQ ID NO: 881 - protein, 11 aa, Homo sapiens
  peptide 837
AEVQSEIERIF

SEQ ID NO: 882 - protein, 11 aa, Homo sapiens
  peptide 838
AKRSVLNNPSK

SEQ ID NO: 883 - protein, 14 aa, Homo sapiens
  peptide 839
ISITRVTADISLAK

SEQ ID NO: 884 - protein, 11 aa, Homo sapiens
  peptide 840
RPSDSDVSLEE

SEQ ID NO: 885 - protein, 11 aa, Homo sapiens
  peptide 841
SEIERIFELAR

SEQ ID NO: 886 - protein, 11 aa, Homo sapiens
  peptide 842
SLAEVQSEIER

SEQ ID NO: 887 - protein, 14 aa, Homo sapiens
  peptide 843
YPLVEEDYPDSYQD

SEQ ID NO: 888 - protein, 14 aa, Homo sapiens
  peptide 844
AANQKLALQKAKEV

SEQ ID NO: 889 - protein, 11 aa, Homo sapiens
  peptide 845
AGGSGPPQQQQ

SEQ ID NO: 890 - protein, 14 aa, Homo sapiens
  peptide 846
AGGSGPPQQQQQQQ

SEQ ID NO: 891 - protein, 11 aa, Homo sapiens
  peptide 847
AKPLTRHMPQN

SEQ ID NO: 892 - protein, 14 aa, Homo sapiens
  peptide 848
ALEQHLPDDDKTPM

SEQ ID NO: 893 - protein, 11 aa, Homo sapiens
  peptide 849
ALYNEMDPDER

SEQ ID NO: 894 - protein, 14 aa, Homo sapiens
  peptide 850
ANAQELTKDEQEEE

SEQ ID NO: 895 - protein, 14 aa, Homo sapiens
  peptide 851
ARDREWKKYEFHYD

SEQ ID NO: 896 - protein, 11 aa, Homo sapiens
  peptide 852
ARGGEGEGEGP

SEQ ID NO: 897 - protein, 14 aa, Homo sapiens
  peptide 853
ARTMALYNPIPVRQ

SEQ ID NO: 898 - protein, 14 aa, Homo sapiens
  peptide 854
ASERSLGRYTDVDT

SEQ ID NO: 899 - protein, 14 aa, Homo sapiens
  peptide 855
ASREALYNEMDPDE

SEQ ID NO: 900 - protein, 11 aa, Homo sapiens
  peptide 856
AVDNLANAQEL

SEQ ID NO: 901 - protein, 11 aa, Homo sapiens
  peptide 857
DEDSDEDEFQI

SEQ ID NO: 902 - protein, 11 aa, Homo sapiens
  peptide 858
DEGTPPTNFDT

SEQ ID NO: 903 - protein, 14 aa, Homo sapiens
  peptide 859
DHHAREGSLEQPGF

SEQ ID NO: 904 - protein, 11 aa, Homo sapiens
  peptide 860
DPQENRNNNTN

SEQ ID NO: 905 - protein, 14 aa, Homo sapiens
  peptide 861
DRARDPSGSAGLDA

SEQ ID NO: 906 - protein, 11 aa, Homo sapiens
  peptide 862
EEEKKEEEEDD

SEQ ID NO: 907 - protein, 14 aa, Homo sapiens
  peptide 863
EEKKEEEEDDRGED

SEQ ID NO: 908 - protein, 11 aa, Homo sapiens
  peptide 864
EGPYGRESDHH

SEQ ID NO: 909 - protein, 11 aa, Homo sapiens
  peptide 865
EPYSESDDDWC

SEQ ID NO: 910 - protein, 14 aa, Homo sapiens
  peptide 866
EQDRTPLMFQRMEP

SEQ ID NO: 911 - protein, 11 aa, Homo sapiens
  peptide 867
EQEEEEAANQK

SEQ ID NO: 912 - protein, 11 aa, Homo sapiens
  peptide 868
EQGPPTDMPNS

SEQ ID NO: 913 - protein, 11 aa, Homo sapiens
  peptide 869
EVAEVSPLSAA

SEQ ID NO: 914 - protein, 14 aa, Homo sapiens
  peptide 870
EVILAEDETDGEQR

SEQ ID NO: 915 - protein, 14 aa, Homo sapiens
  peptide 871
EVKARDREWKKYEF

SEQ ID NO: 916 - protein, 11 aa, Homo sapiens
  peptide 872
EYLTRDSSILG

SEQ ID NO: 917 - protein, 11 aa, Homo sapiens
  peptide 873
FDTFPAAIMTV

SEQ ID NO: 918 - protein, 11 aa, Homo sapiens
  peptide 874
FEKDCRGKYLL

SEQ ID NO: 919 - protein, 11 aa, Homo sapiens
  peptide 875
FEYLTRDSSIL

SEQ ID NO: 920 - protein, 11 aa, Homo sapiens
  peptide 876
FFIYAIIGMQV

SEQ ID NO: 921 - protein, 11 aa, Homo sapiens
  peptide 877
FLKLRRQQQIE

SEQ ID NO: 922 - protein, 11 aa, Homo sapiens
  peptide 878
FVAVIMDNFEY

SEQ ID NO: 923 - protein, 14 aa, Homo sapiens
  peptide 879
GALMAHESGLKESP

SEQ ID NO: 924 - protein, 11 aa, Homo sapiens
  peptide 880
GPPQQQQQQQQ

SEQ ID NO: 925 - protein, 11 aa, Homo sapiens
  peptide 881
GRESDHHAREG

SEQ ID NO: 926 - protein, 11 aa, Homo sapiens
  peptide 882
GSDYDEADGPG

SEQ ID NO: 927 - protein, 11 aa, Homo sapiens
  peptide 883
GSGPPQQQQQQ

SEQ ID NO: 928 - protein, 14 aa, Homo sapiens
  peptide 884
GSGVPVSGPNLSTT

SEQ ID NO: 929 - protein, 14 aa, Homo sapiens
  peptide 885
HHHHHHHHHHPPPP

SEQ ID NO: 930 - protein, 14 aa, Homo sapiens
  peptide 886
HHHHHHHPPPPDKD

SEQ ID NO: 931 - protein, 11 aa, Homo sapiens
  peptide 887
HHHHHHPPPPD

SEQ ID NO: 932 - protein, 11 aa, Homo sapiens
  peptide 888
HHHHPPPPDKD

SEQ ID NO: 933 - protein, 14 aa, Homo sapiens
  peptide 889
HHLDEYVRVWAEYD

SEQ ID NO: 934 - protein, 11 aa, Homo sapiens
  peptide 890
HYLPMEGQGRA

SEQ ID NO: 935 - protein, 11 aa, Homo sapiens
  peptide 891
IDVEDEDSDED

SEQ ID NO: 936 - protein, 11 aa, Homo sapiens
  peptide 892
IQQDLGRQDPP

SEQ ID NO: 937 - protein, 11 aa, Homo sapiens
  peptide 893
KDEQEEEEAAN

SEQ ID NO: 938 - protein, 11 aa, Homo sapiens
  peptide 894
KGGADKQQMDA

SEQ ID NO: 939 - protein, 14 aa, Homo sapiens
  peptide 895
KGGADKQQMDAELR

SEQ ID NO: 940 - protein, 11 aa, Homo sapiens
  peptide 896
KKEEEKKEEEE

SEQ ID NO: 941 - protein, 11 aa, Homo sapiens
  peptide 897
KPCDKNSGILT

SEQ ID NO: 942 - protein, 11 aa, Homo sapiens
  peptide 898
LAEDETDGEQR

SEQ ID NO: 943 - protein, 14 aa, Homo sapiens
  peptide 899
LFGNYTLLNVFLAI

SEQ ID NO: 944 - protein, 14 aa, Homo sapiens
  peptide 900
LGVLSGEFAKERER

SEQ ID NO: 945 - protein, 11 aa, Homo sapiens
  peptide 901
LIFAIIGLEFY

SEQ ID NO: 946 - protein, 14 aa, Homo sapiens
  peptide 902
LRALRLLRIFKVTK

SEQ ID NO: 947 - protein, 14 aa, Homo sapiens
  peptide 903
LRPLKTIKRLPKLK

SEQ ID NO: 948 - protein, 11 aa, Homo sapiens
  peptide 904
LSTTRPIQQDL

SEQ ID NO: 949 - protein, 11 aa, Homo sapiens
  peptide 905
LTKDEQEEEEA

SEQ ID NO: 950 - protein, 11 aa, Homo sapiens
  peptide 906
LTRDSSILGPH

SEQ ID NO: 951 - protein, 11 aa, Homo sapiens
  peptide 907
MAGAYDAPPPV

SEQ ID NO: 952 - protein, 14 aa, Homo sapiens
  peptide 908
NIGIDVEDEDSDED

SEQ ID NO: 953 - protein, 11 aa, Homo sapiens
  peptide 909
PLMFQRMEPPS

SEQ ID NO: 954 - protein, 14 aa, Homo sapiens
  peptide 910
PLPKKEEEKKEEEE

SEQ ID NO: 955 - protein, 11 aa, Homo sapiens
  peptide 911
PLSAANMSIAV

SEQ ID NO: 956 - protein, 14 aa, Homo sapiens
  peptide 912
PNAPRNNVLRYFDY

SEQ ID NO: 957 - protein, 11 aa, Homo sapiens
  peptide 913
PNSQSVEMREM

SEQ ID NO: 958 - protein, 11 aa, Homo sapiens
  peptide 914
PQQQQQQQQQQ

SEQ ID NO: 959 - protein, 14 aa, Homo sapiens
  peptide 915
PQQQQQQQQQQQQQ

SEQ ID NO: 960 - protein, 14 aa, Homo sapiens
  peptide 916
PTNFDTFPAAIMTV

SEQ ID NO: 961 - protein, 11 aa, Homo sapiens
  peptide 917
PYGRESDHHAR

SEQ ID NO: 962 - protein, 14 aa, Homo sapiens
  peptide 918
QILTGEDWNEVMYD

SEQ ID NO: 963 - protein, 11 aa, Homo sapiens
  peptide 919
QQQQQQQQQQA

SEQ ID NO: 964 - protein, 11 aa, Homo sapiens
  peptide 920
QQQQQQQQQQQ

SEQ ID NO: 965 - protein, 14 aa, Homo sapiens
  peptide 921
RDGYSDSEHYLPME

SEQ ID NO: 966 - protein, 11 aa, Homo sapiens
  peptide 922
RDRSHRASERS

SEQ ID NO: 967 - protein, 11 aa, Homo sapiens
  peptide 923
RMRFYIRRMVK

SEQ ID NO: 968 - protein, 14 aa, Homo sapiens
  peptide 924
RRMRFYIRRMVKTQ

SEQ ID NO: 969 - protein, 14 aa, Homo sapiens
  peptide 925
RRQQQIERELNGYM

SEQ ID NO: 970 - protein, 14 aa, Homo sapiens
  peptide 926
RTPLMFQRMEPPSP

SEQ ID NO: 971 - protein, 14 aa, Homo sapiens
  peptide 927
RYHDRARDPSGSAG

SEQ ID NO: 972 - protein, 11 aa, Homo sapiens
  peptide 928
SDSEHYLPMEG

SEQ ID NO: 973 - protein, 11 aa, Homo sapiens
  peptide 929
SEHYLPMEGQG

SEQ ID NO: 974 - protein, 14 aa, Homo sapiens
  peptide 930
SGKPCDKNSGILTR

SEQ ID NO: 975 - protein, 11 aa, Homo sapiens
  peptide 931
SGLKESPSWVT

SEQ ID NO: 976 - protein, 14 aa, Homo sapiens
  peptide 932
SGPPQQQQQQQQQQ

SEQ ID NO: 977 - protein, 11 aa, Homo sapiens
  peptide 933
SLFSLECVLKV

SEQ ID NO: 978 - protein, 11 aa, Homo sapiens
  peptide 934
SPEQGPPTDMP

SEQ ID NO: 979 - protein, 14 aa, Homo sapiens
  peptide 935
SPLSAANMSIAVKE

SEQ ID NO: 980 - protein, 14 aa, Homo sapiens
  peptide 936
STDPGPMLAIPAMA

SEQ ID NO: 981 - protein, 14 aa, Homo sapiens
  peptide 937
TGTWSPEQGPPTDM

SEQ ID NO: 982 - protein, 14 aa, Homo sapiens
  peptide 938
TRPYFHSSFNCFDC

SEQ ID NO: 983 - protein, 11 aa, Homo sapiens
  peptide 939
VEDEDSDEDEF

SEQ ID NO: 984 - protein, 14 aa, Homo sapiens
  peptide 940
VFQILTGEDWNEVM

SEQ ID NO: 985 - protein, 14 aa, Homo sapiens
  peptide 941
VIKPGTSFGISVLR

SEQ ID NO: 986 - protein, 14 aa, Homo sapiens
  peptide 942
WAEYDPAAWGRMPY

SEQ ID NO: 987 - protein, 14 aa, Homo sapiens
  peptide 943
YNPIPVRQNCLTVN

SEQ ID NO: 988 - protein, 11 aa, Homo sapiens
  peptide 944
YRGSDYDEADG

SEQ ID NO: 989 - protein, 14 aa, Homo sapiens
  peptide 945
YSDSEHYLPMEGQG

SEQ ID NO: 990 - protein, 14 aa, Homo sapiens
  peptide 946
DNFEYLTRDSSILG

SEQ ID NO: 991 - protein, 14 aa, Homo sapiens
  peptide 947
DGPGSGGGEEAMAG

SEQ ID NO: 992 - protein, 14 aa, Homo sapiens
  peptide 948
DPQENRNNNTNKSR

SEQ ID NO: 993 - protein, 14 aa, Homo sapiens
  peptide 949
EDSDEDEFQITEHN

SEQ ID NO: 994 - protein, 14 aa, Homo sapiens
  peptide 950
GIDVEDEDSDEDEF

SEQ ID NO: 995 - protein, 14 aa, Homo sapiens
  peptide 951
GNIGIDVEDEDSDE

SEQ ID NO: 996 - protein, 14 aa, Homo sapiens
  peptide 952
LMAHESGLKESPSW

SEQ ID NO: 997 - protein, 14 aa, Homo sapiens
  peptide 953
LVVDPQENRNNNTN

SEQ ID NO: 998 - protein, 14 aa, Homo sapiens
  peptide 954
MDNFEYLTRDSSIL

SEQ ID NO: 999 - protein, 14 aa, Homo sapiens
  peptide 955
NAQELTKDEQEEEE

SEQ ID NO: 1000 - protein, 14 aa, Homo sapiens
  peptide 956
PKKEEEKKEEEEDD

SEQ ID NO: 1001 - protein, 14 aa, Homo sapiens
  peptide 957
VEDEDSDEDEFQIT

SEQ ID NO: 1002 - protein, 14 aa, Homo sapiens
  peptide 958
GICFSFVFGALLEY

SEQ ID NO: 1003 - protein, 14 aa, Homo sapiens
  peptide 959
STVACDMDLAKYPM

SEQ ID NO: 1004 - protein, 14 aa, Homo sapiens
  peptide 960
DEQECMLDLESYGY

SEQ ID NO: 1005 - protein, 14 aa, Homo sapiens
  peptide 961
KKQKAKVKVSRPRA

SEQ ID NO: 1006 - protein, 14 aa, Homo sapiens
  peptide 962
TTELMNFKSAGQFP

SEQ ID NO: 1007 - protein, 14 aa, Homo sapiens
  peptide 963
KDNKGYCAQYRGEV

SEQ ID NO: 1008 - protein, 14 aa, Homo sapiens
  peptide 964
LYCCRRRKQWKNKK

SEQ ID NO: 1009 - protein, 14 aa, Homo sapiens
  peptide 965
QECSPGVVPTPIPI

SEQ ID NO: 1010 - protein, 14 aa, Homo sapiens
  peptide 966
ELLPGVRLGARLLD

SEQ ID NO: 1011 - protein, 14 aa, Homo sapiens
  peptide 967
SVIDYEEQRTVDPE

SEQ ID NO: 1012 - protein, 14 aa, Homo sapiens
  peptide 968
AREEAEPVFRAAEE

SEQ ID NO: 1013 - protein, 14 aa, Homo sapiens
  peptide 969
DLALLQFLGDDEIE

SEQ ID NO: 1014 - protein, 14 aa, Homo sapiens
  peptide 970
DNMAGVFYMLLVAM

SEQ ID NO: 1015 - protein, 14 aa, Homo sapiens
  peptide 971
ERSEIVDFSVPFVE

SEQ ID NO: 1016 - protein, 14 aa, Homo sapiens
  peptide 972
GGAGGPGGGLGGAR

SEQ ID NO: 1017 - protein, 14 aa, Homo sapiens
  peptide 973
IRLLFCAREEAEPV

SEQ ID NO: 1018 - protein, 14 aa, Homo sapiens
  peptide 974
LADGFHRYYGPIEP

SEQ ID NO: 1019 - protein, 14 aa, Homo sapiens
  peptide 975
LLGPGAGGAGGTGG

SEQ ID NO: 1020 - protein, 14 aa, Homo sapiens
  peptide 976
PGAGGAGGTGGAGG

SEQ ID NO: 1021 - protein, 14 aa, Homo sapiens
  peptide 977
PSPSDSEDSESLGG

SEQ ID NO: 1022 - protein, 14 aa, Homo sapiens
  peptide 978
PWWFADFPYPYAER

SEQ ID NO: 1023 - protein, 14 aa, Homo sapiens
  peptide 979
SQPLLGPGAGGAGG

SEQ ID NO: 1024 - protein, 14 aa, Homo sapiens
  peptide 980
SRYGRFLQPVDDTQ

SEQ ID NO: 1025 - protein, 14 aa, Homo sapiens
  peptide 981
SYTANLAAFMIQEE

SEQ ID NO: 1026 - protein, 14 aa, Homo sapiens
  peptide 982
TEQQLQVIFEVLEE

SEQ ID NO: 1027 - protein, 14 aa, Homo sapiens
  peptide 983
TQHLTVATLEERPF

SEQ ID NO: 1028 - protein, 14 aa, Homo sapiens
  peptide 984
ALLQFLGDDEIEML

SEQ ID NO: 1029 - protein, 14 aa, Homo sapiens
  peptide 985
GDDEIEMLERLWLS

SEQ ID NO: 1030 - protein, 14 aa, Homo sapiens
  peptide 986
GPGAGGAGGTGGAG

SEQ ID NO: 1031 - protein, 14 aa, Homo sapiens
  peptide 987
IDLALLQFLGDDEI

SEQ ID NO: 1032 - protein, 14 aa, Homo sapiens
  peptide 988
KKIDGVWNGMIGEV

SEQ ID NO: 1033 - protein, 14 aa, Homo sapiens
  peptide 989
PLLGPGAGGAGGTG

SEQ ID NO: 1034 - protein, 14 aa, Homo sapiens
  peptide 990
QFLGDDEIEMLERL

SEQ ID NO: 1035 - protein, 14 aa, Homo sapiens
  peptide 991
VWVMMFVMCLTVVA

SEQ ID NO: 1036 - protein, 14 aa, Homo sapiens
  peptide 992
NLFDTAEVYAAGKA

SEQ ID NO: 1037 - protein, 11 aa, Homo sapiens
  peptide 993
ANKSESEPDFF

SEQ ID NO: 1038 - protein, 14 aa, Homo sapiens
  peptide 994
AQRPLRRQAAIRTD

SEQ ID NO: 1039 - protein, 14 aa, Homo sapiens
  peptide 995
AWIAIFQVITLEGW

SEQ ID NO: 1040 - protein, 14 aa, Homo sapiens
  peptide 996
CVTLGMFRPCEDIA

SEQ ID NO: 1041 - protein, 14 aa, Homo sapiens
  peptide 997
DFFSPSLDGDGDRK

SEQ ID NO: 1042 - protein, 14 aa, Homo sapiens
  peptide 998
DGDRKKCLALVSLG

SEQ ID NO: 1043 - protein, 14 aa, Homo sapiens
  peptide 999
DRKNFDSLLWAIVT

SEQ ID NO: 1044 - protein, 14 aa, Homo sapiens
  peptide 1000
DSCPYCARAGAGEV

SEQ ID NO: 1045 - protein, 14 aa, Homo sapiens
  peptide 1001
DSKDPLASGPPDSM

SEQ ID NO: 1046 - protein, 11 aa, Homo sapiens
  peptide 1002
DTLPMLGNVLL

SEQ ID NO: 1047 - protein, 11 aa, Homo sapiens
  peptide 1003
EAELEAELELE

SEQ ID NO: 1048 - protein, 14 aa, Homo sapiens
  peptide 1004
ELTNALEISNIVFT

SEQ ID NO: 1049 - protein, 14 aa, Homo sapiens
  peptide 1005
ENFHKCRQHQEEEE

SEQ ID NO: 1050 - protein, 11 aa, Homo sapiens
  peptide 1006
EWELKLMDELA

SEQ ID NO: 1051 - protein, 14 aa, Homo sapiens
  peptide 1007
FAALGVELFGDLEC

SEQ ID NO: 1052 - protein, 14 aa, Homo sapiens
  peptide 1008
FIIFGILGVQLFKG

SEQ ID NO: 1053 - protein, 11 aa, Homo sapiens
  peptide 1009
FVLTAQFVLVN

SEQ ID NO: 1054 - protein, 11 aa, Homo sapiens
  peptide 1010
FYHADCHLEPV

SEQ ID NO: 1055 - protein, 14 aa, Homo sapiens
  peptide 1011
GAGEVELADREMPD

SEQ ID NO: 1056 - protein, 11 aa, Homo sapiens
  peptide 1012
GDLLPPGGQEE

SEQ ID NO: 1057 - protein, 11 aa, Homo sapiens
  peptide 1013
GERRSLLSGEG

SEQ ID NO: 1058 - protein, 11 aa, Homo sapiens
  peptide 1014
GGSDPQIPLAE

SEQ ID NO: 1059 - protein, 11 aa, Homo sapiens
  peptide 1015
GIMIAILVNTL

SEQ ID NO: 1060 - protein, 14 aa, Homo sapiens
  peptide 1016
GLDYEAYNSSSNTT

SEQ ID NO: 1061 - protein, 14 aa, Homo sapiens
  peptide 1017
GQESQDEEESSEEE

SEQ ID NO: 1062 - protein, 14 aa, Homo sapiens
  peptide 1018
HPTDRQLFDTISLL

SEQ ID NO: 1063 - protein, 14 aa, Homo sapiens
  peptide 1019
HSPLGSPFLWPGVE

SEQ ID NO: 1064 - protein, 11 aa, Homo sapiens
  peptide 1020
IPLAEMEALSL

SEQ ID NO: 1065 - protein, 14 aa, Homo sapiens
  peptide 1021
KEAKEEAELEAELE

SEQ ID NO: 1066 - protein, 14 aa, Homo sapiens
  peptide 1022
KKRRNLMLDDVIAS

SEQ ID NO: 1067 - protein, 14 aa, Homo sapiens
  peptide 1023
KLLKMAVGMRALLD

SEQ ID NO: 1068 - protein, 14 aa, Homo sapiens
  peptide 1024
KMAVGMRALLDTVM

SEQ ID NO: 1069 - protein, 14 aa, Homo sapiens
  peptide 1025
LARALRPDDPPLDG

SEQ ID NO: 1070 - protein, 14 aa, Homo sapiens
  peptide 1026
LDGDGDRKKCLALV

SEQ ID NO: 1071 - protein, 11 aa, Homo sapiens
  peptide 1027
LDYEAYNSSSN

SEQ ID NO: 1072 - protein, 14 aa, Homo sapiens
  peptide 1028
LKYLVYILRKAARR

SEQ ID NO: 1073 - protein, 11 aa, Homo sapiens
  peptide 1029
LMTFGNYVLFN

SEQ ID NO: 1074 - protein, 11 aa, Homo sapiens
  peptide 1030
LNIPPGPYSSM

SEQ ID NO: 1075 - protein, 11 aa, Homo sapiens
  peptide 1031
LPACCLERDSW

SEQ ID NO: 1076 - protein, 14 aa, Homo sapiens
  peptide 1032
LVHHHHHHHHHYHL

SEQ ID NO: 1077 - protein, 11 aa, Homo sapiens
  peptide 1033
LVTLLLDTLPM

SEQ ID NO: 1078 - protein, 14 aa, Homo sapiens
  peptide 1034
MDAHSFYNFIYFIL

SEQ ID NO: 1079 - protein, 14 aa, Homo sapiens
  peptide 1035
MFVGVVVENFHKCR

SEQ ID NO: 1080 - protein, 14 aa, Homo sapiens
  peptide 1036
MRILVTLLLDTLPM

SEQ ID NO: 1081 - protein, 11 aa, Homo sapiens
  peptide 1037
NYIFTAVFLAE

SEQ ID NO: 1082 - protein, 11 aa, Homo sapiens
  peptide 1038
PPETRSSLELD

SEQ ID NO: 1083 - protein, 11 aa, Homo sapiens
  peptide 1039
PQIPLAEMEAL

SEQ ID NO: 1084 - protein, 14 aa, Homo sapiens
  peptide 1040
PSGERRSLLSGEGQ

SEQ ID NO: 1085 - protein, 14 aa, Homo sapiens
  peptide 1041
PSLGGSDPQIPLAE

SEQ ID NO: 1086 - protein, 11 aa, Homo sapiens
  peptide 1042
QEDWNKVLYNG

SEQ ID NO: 1087 - protein, 14 aa, Homo sapiens
  peptide 1043
QSGSVLSVHSQPAD

SEQ ID NO: 1088 - protein, 14 aa, Homo sapiens
  peptide 1044
RARLPACCLERDSW

SEQ ID NO: 1089 - protein, 14 aa, Homo sapiens
  peptide 1045
RLEKKRRNLMLDDV

SEQ ID NO: 1090 - protein, 14 aa, Homo sapiens
  peptide 1046
RLRRLEKKRRNLML

SEQ ID NO: 1091 - protein, 14 aa, Homo sapiens
  peptide 1047
RLSVHHLVHHHHHH

SEQ ID NO: 1092 - protein, 14 aa, Homo sapiens
  peptide 1048
RQHQEEEEARRREE

SEQ ID NO: 1093 - protein, 11 aa, Homo sapiens
  peptide 1049
SLEWELKLMDE

SEQ ID NO: 1094 - protein, 14 aa, Homo sapiens
  peptide 1050
SPEIQDRDANGSRR

SEQ ID NO: 1095 - protein, 11 aa, Homo sapiens
  peptide 1051
SRFRLLVHHLC

SEQ ID NO: 1096 - protein, 11 aa, Homo sapiens
  peptide 1052
SVLSVHSQPAD

SEQ ID NO: 1097 - protein, 11 aa, Homo sapiens
  peptide 1053
VGSGKVYPTVH

SEQ ID NO: 1098 - protein, 14 aa, Homo sapiens
  peptide 1054
VIDILVSMVSDSGT

SEQ ID NO: 1099 - protein, 11 aa, Homo sapiens
  peptide 1055
VLYNGMASTSS

SEQ ID NO: 1100 - protein, 11 aa, Homo sapiens
  peptide 1056
WSAYIFPPQSR

SEQ ID NO: 1101 - protein, 11 aa, Homo sapiens
  peptide 1057
YEAYNSSSNTT

SEQ ID NO: 1102 - protein, 14 aa, Homo sapiens
  peptide 1058
ALGVELFGDLECDE

SEQ ID NO: 1103 - protein, 14 aa, Homo sapiens
  peptide 1059
ASGRLARALRPDDP

SEQ ID NO: 1104 - protein, 14 aa, Homo sapiens
  peptide 1060
DYEAYNSSSNTTCV

SEQ ID NO: 1105 - protein, 14 aa, Homo sapiens
  peptide 1061
FFVCQGEDTRNITN

SEQ ID NO: 1106 - protein, 14 aa, Homo sapiens
  peptide 1062
FGDLECDETHPCEG

SEQ ID NO: 1107 - protein, 14 aa, Homo sapiens
  peptide 1063
FILLIIVGSFFMIN

SEQ ID NO: 1108 - protein, 14 aa, Homo sapiens
  peptide 1064
GNVLLLCFFVFFIF

SEQ ID NO: 1109 - protein, 14 aa, Homo sapiens
  peptide 1065
KRLRRLEKKRRNLM

SEQ ID NO: 1110 - protein, 14 aa, Homo sapiens
  peptide 1066
LRAINRVPSMRILV

SEQ ID NO: 1111 - protein, 14 aa, Homo sapiens
  peptide 1067
NIGYAWIAIFQVIT

SEQ ID NO: 1112 - protein, 14 aa, Homo sapiens
  peptide 1068
PAPCPGPEPNWGKG

SEQ ID NO: 1113 - protein, 14 aa, Homo sapiens
  peptide 1069
RRREEKRLRRLEKK

SEQ ID NO: 1114 - protein, 14 aa, Homo sapiens
  peptide 1070
SETKQRESQLMREQ

SEQ ID NO: 1115 - protein, 14 aa, Homo sapiens
  peptide 1071
AAAGDEERKVGLAP

SEQ ID NO: 1116 - protein, 14 aa, Homo sapiens
  peptide 1072
DAIEESPSKEPKPV

SEQ ID NO: 1117 - protein, 14 aa, Homo sapiens
  peptide 1073
DRGYGNDFPIEDMI

SEQ ID NO: 1118 - protein, 14 aa, Homo sapiens
  peptide 1074
DTDPFTPSGSMPLS

SEQ ID NO: 1119 - protein, 14 aa, Homo sapiens
  peptide 1075
ELERSPSGFSISQD

SEQ ID NO: 1120 - protein, 14 aa, Homo sapiens
  peptide 1076
GDEERKVGLAPGDV

SEQ ID NO: 1121 - protein, 14 aa, Homo sapiens
  peptide 1077
GGGAANPAGGDAAA

SEQ ID NO: 1122 - protein, 14 aa, Homo sapiens
  peptide 1078
SITRDSDTPLSLMS

SEQ ID NO: 1123 - protein, 14 aa, Homo sapiens
  peptide 1079
TIICNYSETGPPEP

SEQ ID NO: 1124 - protein, 14 aa, Homo sapiens
  peptide 1080
DQSMMGKFVKVERQ

SEQ ID NO: 1125 - protein, 14 aa, Homo sapiens
  peptide 1081
EELERSPSGFSISQ

SEQ ID NO: 1126 - protein, 14 aa, Homo sapiens
  peptide 1082
EVDAQGEEMKEEFE

SEQ ID NO: 1127 - protein, 14 aa, Homo sapiens
  peptide 1083
HALVFLIVLGCLIL

SEQ ID NO: 1128 - protein, 14 aa, Homo sapiens
  peptide 1084
MMGKFVKVERQVQD

SEQ ID NO: 1129 - protein, 14 aa, Homo sapiens
  peptide 1085
RYKGWRGRLKFARK

SEQ ID NO: 1130 - protein, 14 aa, Homo sapiens
  peptide 1086
VRILQFRLYKKKFK

SEQ ID NO: 1131 - protein, 14 aa, Homo sapiens
  peptide 1087
DLHSTWQYYERTVT

SEQ ID NO: 1132 - protein, 14 aa, Homo sapiens
  peptide 1088
GEDIVDDKSCPCEF

SEQ ID NO: 1133 - protein, 14 aa, Homo sapiens
  peptide 1089
ARLPPYRYRFRRRS

SEQ ID NO: 1134 - protein, 11 aa, Homo sapiens
  peptide 1090
KESLHNNPANR

SEQ ID NO: 1135 - protein, 11 aa, Homo sapiens
  peptide 1091
TFARLPPYRYR

SEQ ID NO: 1136 - protein, 14 aa, Homo sapiens
  peptide 1092
FPEDADYEQDTAEY

SEQ ID NO: 1137 - protein, 14 aa, Homo sapiens
  peptide 1093
IDHFPEDADYEQDT

SEQ ID NO: 1138 - protein, 14 aa, Homo sapiens
  peptide 1094
YRYRFRRRSSSRST

SEQ ID NO: 1139 - protein, 14 aa, Homo sapiens
  peptide 1095
AEDTPFDFELYLVG

SEQ ID NO: 1140 - protein, 14 aa, Homo sapiens
  peptide 1096
AQVQPKRALLPAPV

SEQ ID NO: 1141 - protein, 14 aa, Homo sapiens
  peptide 1097
DLLERLAEDTPFDF

SEQ ID NO: 1142 - protein, 14 aa, Homo sapiens
  peptide 1098
EPSGPEVEQQQQQQ

SEQ ID NO: 1143 - protein, 14 aa, Homo sapiens
  peptide 1099
ERLAEDTPFDFELY

SEQ ID NO: 1144 - protein, 14 aa, Homo sapiens
  peptide 1100
FEELSGIHDPKLHH

SEQ ID NO: 1145 - protein, 14 aa, Homo sapiens
  peptide 1101
GEHAFFRLALPRIR

SEQ ID NO: 1146 - protein, 14 aa, Homo sapiens
  peptide 1102
GPEVEQQQQQQDQP

SEQ ID NO: 1147 - protein, 14 aa, Homo sapiens
  peptide 1103
KMVPCGKRVFAVTE

SEQ ID NO: 1148 - protein, 14 aa, Homo sapiens
  peptide 1104
LVRRGQLLAQLGDS

SEQ ID NO: 1149 - protein, 14 aa, Homo sapiens
  peptide 1105
NAFIMDKSLLDYEV

SEQ ID NO: 1150 - protein, 14 aa, Homo sapiens
  peptide 1106
QPKRALLPAPVNCG

SEQ ID NO: 1151 - protein, 14 aa, Homo sapiens
  peptide 1107
SYTANLAAVMVGDK

SEQ ID NO: 1152 - protein, 14 aa, Homo sapiens
  peptide 1108
TPFDFELYLVGDGK

SEQ ID NO: 1153 - protein, 14 aa, Homo sapiens
  peptide 1109
EGPVWLCSYGRPPA

SEQ ID NO: 1154 - protein, 14 aa, Homo sapiens
  peptide 1110
EGSKEETAEAEPSG

SEQ ID NO: 1155 - protein, 14 aa, Homo sapiens
  peptide 1111
EHPFVFARDPDEDG

SEQ ID NO: 1156 - protein, 14 aa, Homo sapiens
  peptide 1112
EPPEGSKEETAEAE

SEQ ID NO: 1157 - protein, 14 aa, Homo sapiens
  peptide 1113
LCQALVPPGVAALL

SEQ ID NO: 1158 - protein, 14 aa, Homo sapiens
  peptide 1114
LRKCCYGYCIDLLE

SEQ ID NO: 1159 - protein, 14 aa, Homo sapiens
  peptide 1115
QQQQQQDQPTAPEG

SEQ ID NO: 1160 - protein, 14 aa, Homo sapiens
  peptide 1116
TAGLPPGLLALGEV

SEQ ID NO: 1161 - protein, 14 aa, Homo sapiens
  peptide 1117
ENILNELNDPLREE

SEQ ID NO: 1162 - protein, 14 aa, Homo sapiens
  peptide 1118
ESSSVLNTDPDAEK

SEQ ID NO: 1163 - protein, 14 aa, Homo sapiens
  peptide 1119
GGGEEPAGGFEDAE

SEQ ID NO: 1164 - protein, 14 aa, Homo sapiens
  peptide 1120
GGGGGGGGGGGGEE

SEQ ID NO: 1165 - protein, 14 aa, Homo sapiens
  peptide 1121
IHPYSDFRFYWDLI

SEQ ID NO: 1166 - protein, 14 aa, Homo sapiens
  peptide 1122
KVDGGGGGGGGGGG

SEQ ID NO: 1167 - protein, 14 aa, Homo sapiens
  peptide 1123
LIMMVGNLVIIPVG

SEQ ID NO: 1168 - protein, 14 aa, Homo sapiens
  peptide 1124
LNDPLREEIVNFNC

SEQ ID NO: 1169 - protein, 14 aa, Homo sapiens
  peptide 1125
LYSLSVDNFNEVLE

SEQ ID NO: 1170 - protein, 14 aa, Homo sapiens
  peptide 1126
RTGTVNEDSSEIIL

SEQ ID NO: 1171 - protein, 14 aa, Homo sapiens
  peptide 1127
RYQGKIFDEENILN

SEQ ID NO: 1172 - protein, 14 aa, Homo sapiens
  peptide 1128
SLSHSNLHSPSPST

SEQ ID NO: 1173 - protein, 14 aa, Homo sapiens
  peptide 1129
SQPPQTQPQQPSPQ

SEQ ID NO: 1174 - protein, 14 aa, Homo sapiens
  peptide 1130
SVLNTDPDAEKPRF

SEQ ID NO: 1175 - protein, 14 aa, Homo sapiens
  peptide 1131
TAGFWIIHPYSDFR

SEQ ID NO: 1176 - protein, 14 aa, Homo sapiens
  peptide 1132
TATSLSHSNLHSPS

SEQ ID NO: 1177 - protein, 14 aa, Homo sapiens
  peptide 1133
YPMMRRAFETVAID

SEQ ID NO: 1178 - protein, 14 aa, Homo sapiens
  peptide 1134
DGGGGGGGGGGGGE

SEQ ID NO: 1179 - protein, 14 aa, Homo sapiens
  peptide 1135
EGGGKPNSSSNSRD

SEQ ID NO: 1180 - protein, 14 aa, Homo sapiens
  peptide 1136
FKVDGGGGGGGGGG

SEQ ID NO: 1181 - protein, 14 aa, Homo sapiens
  peptide 1137
FRTGTVNEDSSEII

SEQ ID NO: 1182 - protein, 14 aa, Homo sapiens
  peptide 1138
GGGGGGGGGGEEPA

SEQ ID NO: 1183 - protein, 14 aa, Homo sapiens
  peptide 1139
IFDEENILNELNDP

SEQ ID NO: 1184 - protein, 14 aa, Homo sapiens
  peptide 1140
QGKIFDEENILNEL

SEQ ID NO: 1185 - protein, 14 aa, Homo sapiens
  peptide 1141
QSQPPQTQPQQPSP

SEQ ID NO: 1186 - protein, 14 aa, Homo sapiens
  peptide 1142
SVCFKVDGGGGGGG

SEQ ID NO: 1187 - protein, 11 aa, Homo sapiens
  peptide 1143
ADMEEEEEEEE

SEQ ID NO: 1188 - protein, 11 aa, Homo sapiens
  peptide 1144
ALGVYIPFPED

SEQ ID NO: 1189 - protein, 11 aa, Homo sapiens
  peptide 1145
ALTCDTEEEEE

SEQ ID NO: 1190 - protein, 11 aa, Homo sapiens
  peptide 1146
ASLPASDTGSM

SEQ ID NO: 1191 - protein, 11 aa, Homo sapiens
  peptide 1147
CKRLVAMNMPL

SEQ ID NO: 1192 - protein, 14 aa, Homo sapiens
  peptide 1148
CVALGVYIPFPEDD

SEQ ID NO: 1193 - protein, 11 aa, Homo sapiens
  peptide 1149
DEDEEEGALAS

SEQ ID NO: 1194 - protein, 11 aa, Homo sapiens
  peptide 1150
DEFKRIWSEYD

SEQ ID NO: 1195 - protein, 14 aa, Homo sapiens
  peptide 1151
DEVIPPPDEEEVTV

SEQ ID NO: 1196 - protein, 11 aa, Homo sapiens
  peptide 1152
DTEEEEEEGQE

SEQ ID NO: 1197 - protein, 14 aa, Homo sapiens
  peptide 1153
DWITQAEELDMEDP

SEQ ID NO: 1198 - protein, 11 aa, Homo sapiens
  peptide 1154
DYAFTSIFTVE

SEQ ID NO: 1199 - protein, 11 aa, Homo sapiens
  peptide 1155
EDEEVPDRLSY

SEQ ID NO: 1200 - protein, 14 aa, Homo sapiens
  peptide 1156
EEEEEEEEEEEEGA

SEQ ID NO: 1201 - protein, 11 aa, Homo sapiens
  peptide 1157
EEEEEEEEEEG

SEQ ID NO: 1202 - protein, 11 aa, Homo sapiens
  peptide 1158
EEEEEEEEGAG

SEQ ID NO: 1203 - protein, 11 aa, Homo sapiens
  peptide 1159
EEEEGQEGVEE

SEQ ID NO: 1204 - protein, 14 aa, Homo sapiens
  peptide 1160
EEEEGQEGVEEEDE

SEQ ID NO: 1205 - protein, 11 aa, Homo sapiens
  peptide 1161
EEGQEGVEEED

SEQ ID NO: 1206 - protein, 11 aa, Homo sapiens
  peptide 1162
EEVPDRLSYLD

SEQ ID NO: 1207 - protein, 11 aa, Homo sapiens
  peptide 1163
EGADMEEEEEE

SEQ ID NO: 1208 - protein, 14 aa, Homo sapiens
  peptide 1164
ELDKNQRQCVEYAL

SEQ ID NO: 1209 - protein, 14 aa, Homo sapiens
  peptide 1165
EPSPANGAGPGPEW

SEQ ID NO: 1210 - protein, 11 aa, Homo sapiens
  peptide 1166
EQVEYVFLVIF

SEQ ID NO: 1211 - protein, 11 aa, Homo sapiens
  peptide 1167
ESILSRFDEED

SEQ ID NO: 1212 - protein, 11 aa, Homo sapiens
  peptide 1168
ETQGDEDEEEG

SEQ ID NO: 1213 - protein, 11 aa, Homo sapiens
  peptide 1169
EVIPPPDEEEV

SEQ ID NO: 1214 - protein, 14 aa, Homo sapiens
  peptide 1170
FACIGVQLFKGKFY

SEQ ID NO: 1215 - protein, 14 aa, Homo sapiens
  peptide 1171
FDNFFFAMLTVFQC

SEQ ID NO: 1216 - protein, 14 aa, Homo sapiens
  peptide 1172
FDYAFTSIFTVEIL

SEQ ID NO: 1217 - protein, 11 aa, Homo sapiens
  peptide 1173
GILETTLVEVG

SEQ ID NO: 1218 - protein, 14 aa, Homo sapiens
  peptide 1174
GSIVDIAVTEVNNG

SEQ ID NO: 1219 - protein, 11 aa, Homo sapiens
  peptide 1175
GVYIPFPEDDS

SEQ ID NO: 1220 - protein, 14 aa, Homo sapiens
  peptide 1176
GYLDWITQAEELDM

SEQ ID NO: 1221 - protein, 11 aa, Homo sapiens
  peptide 1177
IMKTRVCRRLR

SEQ ID NO: 1222 - protein, 11 aa, Homo sapiens
  peptide 1178
IPPPDEEEVTV

SEQ ID NO: 1223 - protein, 11 aa, Homo sapiens
  peptide 1179
ITQAEELDMED

SEQ ID NO: 1224 - protein, 11 aa, Homo sapiens
  peptide 1180
KIKTEGNLEQA

SEQ ID NO: 1225 - protein, 14 aa, Homo sapiens
  peptide 1181
KLLDEVIPPPDEEE

SEQ ID NO: 1226 - protein, 11 aa, Homo sapiens
  peptide 1182
KQEIADACRLT

SEQ ID NO: 1227 - protein, 14 aa, Homo sapiens
  peptide 1183
KQQMEEDLRGYLDW

SEQ ID NO: 1228 - protein, 11 aa, Homo sapiens
  peptide 1184
KRLVAMNMPLN

SEQ ID NO: 1229 - protein, 11 aa, Homo sapiens
  peptide 1185
LGSDMEAEEDP

SEQ ID NO: 1230 - protein, 14 aa, Homo sapiens
  peptide 1186
LISFGIHSSAISVV

SEQ ID NO: 1231 - protein, 14 aa, Homo sapiens
  peptide 1187
LLVLFVIIIYAIIG

SEQ ID NO: 1232 - protein, 11 aa, Homo sapiens
  peptide 1188
LRIVIKKIWKR

SEQ ID NO: 1233 - protein, 11 aa, Homo sapiens
  peptide 1189
MALFTVSTFEG

SEQ ID NO: 1234 - protein, 11 aa, Homo sapiens
  peptide 1190
MEEEEEEEEEE

SEQ ID NO: 1235 - protein, 14 aa, Homo sapiens
  peptide 1191
MLCAFLIINLFVAV

SEQ ID NO: 1236 - protein, 14 aa, Homo sapiens
  peptide 1192
MSESEGGKDTTPEP

SEQ ID NO: 1237 - protein, 11 aa, Homo sapiens
  peptide 1193
MTETQGDEDEE

SEQ ID NO: 1238 - protein, 11 aa, Homo sapiens
  peptide 1194
NATLFALVRTS

SEQ ID NO: 1239 - protein, 11 aa, Homo sapiens
  peptide 1195
NLEQVEYVFLV

SEQ ID NO: 1240 - protein, 11 aa, Homo sapiens
  peptide 1196
PFPEDDSNTAN

SEQ ID NO: 1241 - protein, 11 aa, Homo sapiens
  peptide 1197
QAEELDMEDPS

SEQ ID NO: 1242 - protein, 11 aa, Homo sapiens
  peptide 1198
QDAMGYELPWV

SEQ ID NO: 1243 - protein, 11 aa, Homo sapiens
  peptide 1199
QGTSSLYSDEE

SEQ ID NO: 1244 - protein, 11 aa, Homo sapiens
  peptide 1200
QYRVWATVNSA

SEQ ID NO: 1245 - protein, 14 aa, Homo sapiens
  peptide 1201
RLTLDEMDNAASDL

SEQ ID NO: 1246 - protein, 14 aa, Homo sapiens
  peptide 1202
RNNNFQTFPQAVLL

SEQ ID NO: 1247 - protein, 11 aa, Homo sapiens
  peptide 1203
RREGADMEEEE

SEQ ID NO: 1248 - protein, 14 aa, Homo sapiens
  peptide 1204
RREGADMEEEEEEE

SEQ ID NO: 1249 - protein, 11 aa, Homo sapiens
  peptide 1205
RVCRRLRRANR

SEQ ID NO: 1250 - protein, 14 aa, Homo sapiens
  peptide 1206
SHASLPASDTGSMT

SEQ ID NO: 1251 - protein, 14 aa, Homo sapiens
  peptide 1207
SLPASDTGSMTETQ

SEQ ID NO: 1252 - protein, 14 aa, Homo sapiens
  peptide 1208
STSSHASLPASDTG

SEQ ID NO: 1253 - protein, 14 aa, Homo sapiens
  peptide 1209
TFEGWPALLYKAID

SEQ ID NO: 1254 - protein, 14 aa, Homo sapiens
  peptide 1210
TGSMTETQGDEDEE

SEQ ID NO: 1255 - protein, 11 aa, Homo sapiens
  peptide 1211
TNRRRGRLRWF

SEQ ID NO: 1256 - protein, 14 aa, Homo sapiens
  peptide 1212
TQAEELDMEDPSAD

SEQ ID NO: 1257 - protein, 14 aa, Homo sapiens
  peptide 1213
TSSLYSDEESILSR

SEQ ID NO: 1258 - protein, 11 aa, Homo sapiens
  peptide 1214
VASAQRSPRAL

SEQ ID NO: 1259 - protein, 14 aa, Homo sapiens
  peptide 1215
VEYVFLVIFTVETV

SEQ ID NO: 1260 - protein, 11 aa, Homo sapiens
  peptide 1216
VVPKEKVVPIP

SEQ ID NO: 1261 - protein, 11 aa, Homo sapiens
  peptide 1217
WATPPQRGRLL

SEQ ID NO: 1262 - protein, 11 aa, Homo sapiens
  peptide 1218
YFLGSDMEAEE

SEQ ID NO: 1263 - protein, 11 aa, Homo sapiens
  peptide 1219
YIPFPEDDSNT

SEQ ID NO: 1264 - protein, 11 aa, Homo sapiens
  peptide 1220
YLDWITQAEEL

SEQ ID NO: 1265 - protein, 11 aa, Homo sapiens
  peptide 1221
YLGRSSGPLRT

SEQ ID NO: 1266 - protein, 11 aa, Homo sapiens
  peptide 1222
YVFLVIFTVET

SEQ ID NO: 1267 - protein, 14 aa, Homo sapiens
  peptide 1223
ARREGADMEEEEEE

SEQ ID NO: 1268 - protein, 14 aa, Homo sapiens
  peptide 1224
DMEEEEEEEEEEEE

SEQ ID NO: 1269 - protein, 14 aa, Homo sapiens
  peptide 1225
DTEEEEEEGQEGVE

SEQ ID NO: 1270 - protein, 7 aa, Homo sapiens
  peptide 1226
EEEEEEE

SEQ ID NO: 1271 - protein, 14 aa, Homo sapiens
  peptide 1227
EEEEEEEEEEEEEG

SEQ ID NO: 1272 - protein, 14 aa, Homo sapiens
  peptide 1228
EEEEEEEEEEGAGG

SEQ ID NO: 1273 - protein, 14 aa, Homo sapiens
  peptide 1229
EEEEEEEGAGGVEL

SEQ ID NO: 1274 - protein, 14 aa, Homo sapiens
  peptide 1230
EEEEEGQEGVEEED

SEQ ID NO: 1275 - protein, 14 aa, Homo sapiens
  peptide 1231
EEGQEGVEEEDEKD

SEQ ID NO: 1276 - protein, 14 aa, Homo sapiens
  peptide 1232
EGADMEEEEEEEEE

SEQ ID NO: 1277 - protein, 14 aa, Homo sapiens
  peptide 1233
FDEEDLGDEMACVH

SEQ ID NO: 1278 - protein, 14 aa, Homo sapiens
  peptide 1234
FYATFLIQDYFRKF

SEQ ID NO: 1279 - protein, 14 aa, Homo sapiens
  peptide 1235
LDWITQAEELDMED

SEQ ID NO: 1280 - protein, 14 aa, Homo sapiens
  peptide 1236
LTCDTEEEEEEGQE

SEQ ID NO: 1281 - protein, 14 aa, Homo sapiens
  peptide 1237
NTFDALIVVGSIVD

SEQ ID NO: 1282 - protein, 14 aa, Homo sapiens
  peptide 1238
QCLQRQGSCEDLPI

SEQ ID NO: 1283 - protein, 14 aa, Homo sapiens
  peptide 1239
RIVIKKIWKRMKQK

SEQ ID NO: 1284 - protein, 14 aa, Homo sapiens
  peptide 1240
RLRRANRVLRARCR

SEQ ID NO: 1285 - protein, 14 aa, Homo sapiens
  peptide 1241
RQALTCDTEEEEEE

SEQ ID NO: 1286 - protein, 14 aa, Homo sapiens
  peptide 1242
SDEESILSRFDEED

SEQ ID NO: 1287 - protein, 14 aa, Homo sapiens
  peptide 1243
VYIPFPEDDSNTAN

SEQ ID NO: 1288 - protein, 14 aa, Homo sapiens
  peptide 1244
CDGDNDCEDDSDEQ

SEQ ID NO: 1289 - protein, 14 aa, Homo sapiens
  peptide 1245
CDGDNDCGDHSDED

SEQ ID NO: 1290 - protein, 14 aa, Homo sapiens
  peptide 1246
DDDCGDWSDESDCS

SEQ ID NO: 1291 - protein, 14 aa, Homo sapiens
  peptide 1247
DNDCEDDSDEQDCP

SEQ ID NO: 1292 - protein, 14 aa, Homo sapiens
  peptide 1248
DNDCGDHSDEDGCI

SEQ ID NO: 1293 - protein, 14 aa, Homo sapiens
  peptide 1249
KKEGGPDHNYTKEK

SEQ ID NO: 1294 - protein, 14 aa, Homo sapiens
  peptide 1250
NLDGSERKVLINTD

SEQ ID NO: 1295 - protein, 14 aa, Homo sapiens
  peptide 1251
GPGTLHTIDNATTN

SEQ ID NO: 1296 - protein, 14 aa, Homo sapiens
  peptide 1252
KYVRVSQDTPSSVI

SEQ ID NO: 1297 - protein, 14 aa, Homo sapiens
  peptide 1253
LENGVQLKEFVTWD

SEQ ID NO: 1298 - protein, 14 aa, Homo sapiens
  peptide 1254
LEPLSTIQYNVVDG

SEQ ID NO: 1299 - protein, 14 aa, Homo sapiens
  peptide 1255
LSTIQYNVVDGLRD

SEQ ID NO: 1300 - protein, 14 aa, Homo sapiens
  peptide 1256
VCEEMRQLFYDPDE

SEQ ID NO: 1301 - protein, 14 aa, Homo sapiens
  peptide 1257
ADEEQRVPYPALAA

SEQ ID NO: 1302 - protein, 11 aa, Homo sapiens
  peptide 1258
ADGGLSVLRTF

SEQ ID NO: 1303 - protein, 11 aa, Homo sapiens
  peptide 1259
AELDAEIELEM

SEQ ID NO: 1304 - protein, 11 aa, Homo sapiens
  peptide 1260
AGTPLGSVASV

SEQ ID NO: 1305 - protein, 14 aa, Homo sapiens
  peptide 1261
AIVLLSLMGITLEE

SEQ ID NO: 1306 - protein, 14 aa, Homo sapiens
  peptide 1262
AIVPLEPPESEPPM

SEQ ID NO: 1307 - protein, 11 aa, Homo sapiens
  peptide 1263
APHPRPLQEVE

SEQ ID NO: 1308 - protein, 11 aa, Homo sapiens
  peptide 1264
ASAPHPRPLQE

SEQ ID NO: 1309 - protein, 11 aa, Homo sapiens
  peptide 1265
ATGMRALLDTV

SEQ ID NO: 1310 - protein, 14 aa, Homo sapiens
  peptide 1266
ATGMRALLDTVVQA

SEQ ID NO: 1311 - protein, 14 aa, Homo sapiens
  peptide 1267
CEGPDTRNISTKAQ

SEQ ID NO: 1312 - protein, 11 aa, Homo sapiens
  peptide 1268
CGERESLLSGE

SEQ ID NO: 1313 - protein, 14 aa, Homo sapiens
  peptide 1269
CTLLMLFIFIFSIL

SEQ ID NO: 1314 - protein, 14 aa, Homo sapiens
  peptide 1270
DAELDAEIELEMAQ

SEQ ID NO: 1315 - protein, 14 aa, Homo sapiens
  peptide 1271
DEDKTSVHFEEDFH

SEQ ID NO: 1316 - protein, 11 aa, Homo sapiens
  peptide 1272
DKTSVHFEEDF

SEQ ID NO: 1317 - protein, 11 aa, Homo sapiens
  peptide 1273
DLFITFIICVN

SEQ ID NO: 1318 - protein, 11 aa, Homo sapiens
  peptide 1274
DLGVPSGDPFL

SEQ ID NO: 1319 - protein, 11 aa, Homo sapiens
  peptide 1275
DPAEPGEKTPV

SEQ ID NO: 1320 - protein, 11 aa, Homo sapiens
  peptide 1276
EAEASDPADEE

SEQ ID NO: 1321 - protein, 14 aa, Homo sapiens
  peptide 1277
EDAAELDDDSEDSC

SEQ ID NO: 1322 - protein, 11 aa, Homo sapiens
  peptide 1278
EGSGAGGDPAA

SEQ ID NO: 1323 - protein, 11 aa, Homo sapiens
  peptide 1279
EPPESEPPMPV

SEQ ID NO: 1324 - protein, 14 aa, Homo sapiens
  peptide 1280
EPTEGSGAGGDPAA

SEQ ID NO: 1325 - protein, 11 aa, Homo sapiens
  peptide 1281
ERRRRSTFPSP

SEQ ID NO: 1326 - protein, 14 aa, Homo sapiens
  peptide 1282
ERVFLSVSNYIFTA

SEQ ID NO: 1327 - protein, 11 aa, Homo sapiens
  peptide 1283
EVEMETYGAGT

SEQ ID NO: 1328 - protein, 14 aa, Homo sapiens
  peptide 1284
FFLRIDSHREDAAE

SEQ ID NO: 1329 - protein, 14 aa, Homo sapiens
  peptide 1285
FGILGVQLFKGKFY

SEQ ID NO: 1330 - protein, 14 aa, Homo sapiens
  peptide 1286
FIFLNCVTIALERP

SEQ ID NO: 1331 - protein, 14 aa, Homo sapiens
  peptide 1287
FLRPYYQTEEGEEN

SEQ ID NO: 1332 - protein, 14 aa, Homo sapiens
  peptide 1288
FVTFVLVAQFVLVN

SEQ ID NO: 1333 - protein, 11 aa, Homo sapiens
  peptide 1289
GAIVPLEPPES

SEQ ID NO: 1334 - protein, 11 aa, Homo sapiens
  peptide 1290
GEENPFICSSR

SEQ ID NO: 1335 - protein, 11 aa, Homo sapiens
  peptide 1291
GIMMAILVNTL

SEQ ID NO: 1336 - protein, 14 aa, Homo sapiens
  peptide 1292
GSELGVSPSESPAA

SEQ ID NO: 1337 - protein, 14 aa, Homo sapiens
  peptide 1293
HADCHIEGPQERAR

SEQ ID NO: 1338 - protein, 14 aa, Homo sapiens
  peptide 1294
HNGAINFDNIGYAW

SEQ ID NO: 1339 - protein, 14 aa, Homo sapiens
  peptide 1295
ILGMHLFGCKFSLK

SEQ ID NO: 1340 - protein, 11 aa, Homo sapiens
  peptide 1296
KRLRRLERRRR

SEQ ID NO: 1341 - protein, 14 aa, Homo sapiens
  peptide 1297
KTSVHFEEDFHKLR

SEQ ID NO: 1342 - protein, 14 aa, Homo sapiens
  peptide 1298
LDPAEPGEKTPVRP

SEQ ID NO: 1343 - protein, 14 aa, Homo sapiens
  peptide 1299
LGVQLFKGKFYYCE

SEQ ID NO: 1344 - protein, 14 aa, Homo sapiens
  peptide 1300
LQSSWNLLDGLLVL

SEQ ID NO: 1345 - protein, 14 aa, Homo sapiens
  peptide 1301
LSPPLIMCTAATPM

SEQ ID NO: 1346 - protein, 11 aa, Homo sapiens
  peptide 1302
LSPRGTARSPS

SEQ ID NO: 1347 - protein, 11 aa, Homo sapiens
  peptide 1303
MCTAATPMPTP

SEQ ID NO: 1348 - protein, 14 aa, Homo sapiens
  peptide 1304
MFALEMLLKLLACG

SEQ ID NO: 1349 - protein, 14 aa, Homo sapiens
  peptide 1305
MGRLWVTFSGKLRR

SEQ ID NO: 1350 - protein, 14 aa, Homo sapiens
  peptide 1306
MHLFGCKFSLKTDT

SEQ ID NO: 1351 - protein, 14 aa, Homo sapiens
  peptide 1307
PAESCASLQIPLAV

SEQ ID NO: 1352 - protein, 14 aa, Homo sapiens
  peptide 1308
PASAPHPRPLQEVE

SEQ ID NO: 1353 - protein, 14 aa, Homo sapiens
  peptide 1309
PEAEPALGARRKKK

SEQ ID NO: 1354 - protein, 14 aa, Homo sapiens
  peptide 1310
PEPGACDTRLVRAG

SEQ ID NO: 1355 - protein, 14 aa, Homo sapiens
  peptide 1311
PLEPPESEPPMPVG

SEQ ID NO: 1356 - protein, 14 aa, Homo sapiens
  peptide 1312
PLIMCTAATPMPTP

SEQ ID NO: 1357 - protein, 11 aa, Homo sapiens
  peptide 1313
PSPGRGPPDAE

SEQ ID NO: 1358 - protein, 14 aa, Homo sapiens
  peptide 1314
QESPGARDAPNLVA

SEQ ID NO: 1359 - protein, 11 aa, Homo sapiens
  peptide 1315
QVVALPSDFFL

SEQ ID NO: 1360 - protein, 14 aa, Homo sapiens
  peptide 1316
RASSSGAIVPLEPP

SEQ ID NO: 1361 - protein, 14 aa, Homo sapiens
  peptide 1317
SAVQGQGPGHRQRR

SEQ ID NO: 1362 - protein, 14 aa, Homo sapiens
  peptide 1318
SCASLQIPLAVSSP

SEQ ID NO: 1363 - protein, 14 aa, Homo sapiens
  peptide 1319
SHREDAAELDDDSE

SEQ ID NO: 1364 - protein, 14 aa, Homo sapiens
  peptide 1320
SLQIPLAVSSPARS

SEQ ID NO: 1365 - protein, 14 aa, Homo sapiens
  peptide 1321
SNPHNGAINFDNIG

SEQ ID NO: 1366 - protein, 11 aa, Homo sapiens
  peptide 1322
SPPSPGRGPPD

SEQ ID NO: 1367 - protein, 11 aa, Homo sapiens
  peptide 1323
TLGMFRPCEDV

SEQ ID NO: 1368 - protein, 11 aa, Homo sapiens
  peptide 1324
TRNISTKAQCR

SEQ ID NO: 1369 - protein, 11 aa, Homo sapiens
  peptide 1325
VALMTFGNYVL

SEQ ID NO: 1370 - protein, 14 aa, Homo sapiens
  peptide 1326
YTQPQAEGVGAARN

SEQ ID NO: 1371 - protein, 14 aa, Homo sapiens
  peptide 1327
AAELDDDSEDSCCL

SEQ ID NO: 1372 - protein, 14 aa, Homo sapiens
  peptide 1328
AGRHTASVHHLVYH

SEQ ID NO: 1373 - protein, 14 aa, Homo sapiens
  peptide 1329
APGEPGWMGRLWVT

SEQ ID NO: 1374 - protein, 14 aa, Homo sapiens
  peptide 1330
AYTQPQAEGVGAAR

SEQ ID NO: 1375 - protein, 14 aa, Homo sapiens
  peptide 1331
CKFSLKTDTGDTVP

SEQ ID NO: 1376 - protein, 14 aa, Homo sapiens
  peptide 1332
CSSRRDNGMQKCSH

SEQ ID NO: 1377 - protein, 14 aa, Homo sapiens
  peptide 1333
GMHLFGCKFSLKTD

SEQ ID NO: 1378 - protein, 14 aa, Homo sapiens
  peptide 1334
GPEAEPALGARRKK

SEQ ID NO: 1379 - protein, 14 aa, Homo sapiens
  peptide 1335
LDLGVPSGDPFLDG

SEQ ID NO: 1380 - protein, 14 aa, Homo sapiens
  peptide 1336
LLKMATGMRALLDT

SEQ ID NO: 1381 - protein, 14 aa, Homo sapiens
  peptide 1337
PDSRRGSSSSGDPP

SEQ ID NO: 1382 - protein, 14 aa, Homo sapiens
  peptide 1338
QRCVSSRPAAPGGE

SEQ ID NO: 1383 - protein, 14 aa, Homo sapiens
  peptide 1339
QSRWRKKVDPSAVQ

SEQ ID NO: 1384 - protein, 14 aa, Homo sapiens
  peptide 1340
SATPAPGGGADDPV

SEQ ID NO: 1385 - protein, 14 aa, Homo sapiens
  peptide 1341
TFGQRCVSSRPAAP

SEQ ID NO: 1386 - protein, 14 aa, Homo sapiens
  peptide 1342
TILPSGVGSGKGST

SEQ ID NO: 1387 - protein, 14 aa, Homo sapiens
  peptide 1343
VPLEPPESEPPMPV

SEQ ID NO: 1388 - protein, 14 aa, Homo sapiens
  peptide 1344
WNRLDFFIVVAGMM

SEQ ID NO: 1389 - protein, 14 aa, Homo sapiens
  peptide 1345
YHHHHHHHHHYHFS

SEQ ID NO: 1390 - protein, 14 aa, Homo sapiens
  peptide 1346
FLENIVRRSNDTNF

SEQ ID NO: 1391 - protein, 14 aa, Homo sapiens
  peptide 1347
PYDVINAFENVDEV

SEQ ID NO: 1392 - protein, 14 aa, Homo sapiens
  peptide 1348
AYFLCLLSALLLTE

SEQ ID NO: 1393 - protein, 11 aa, Homo sapiens
  peptide 1349
DHILLGVFMLV

SEQ ID NO: 1394 - protein, 11 aa, Homo sapiens
  peptide 1350
DQESNNAAAEW

SEQ ID NO: 1395 - protein, 11 aa, Homo sapiens
  peptide 1351
EIIVTHFPFDE

SEQ ID NO: 1396 - protein, 14 aa, Homo sapiens
  peptide 1352
ETMKSDQESNNAAA

SEQ ID NO: 1397 - protein, 11 aa, Homo sapiens
  peptide 1353
GLVLGSEHETR

SEQ ID NO: 1398 - protein, 14 aa, Homo sapiens
  peptide 1354
GSVVAINPESDQPD

SEQ ID NO: 1399 - protein, 11 aa, Homo sapiens
  peptide 1355
KSDQESNNAAA

SEQ ID NO: 1400 - protein, 11 aa, Homo sapiens
  peptide 1356
KVLLQYTGHIT

SEQ ID NO: 1401 - protein, 14 aa, Homo sapiens
  peptide 1357
LVLYNNADGDFAIV

SEQ ID NO: 1402 - protein, 11 aa, Homo sapiens
  peptide 1358
NVIIPCLLFSF

SEQ ID NO: 1403 - protein, 11 aa, Homo sapiens
  peptide 1359
QDKKIFTEDID

SEQ ID NO: 1404 - protein, 11 aa, Homo sapiens
  peptide 1360
QLIQLINVDEV

SEQ ID NO: 1405 - protein, 11 aa, Homo sapiens
  peptide 1361
RPVEDHRQVVE

SEQ ID NO: 1406 - protein, 11 aa, Homo sapiens
  peptide 1362
SAGLVLGSEHE

SEQ ID NO: 1407 - protein, 14 aa, Homo sapiens
  peptide 1363
SIIITVIVINTHHR

SEQ ID NO: 1408 - protein, 14 aa, Homo sapiens
  peptide 1364
SYCEIIVTHFPFDE

SEQ ID NO: 1409 - protein, 11 aa, Homo sapiens
  peptide 1365
VFVIASIIITV

SEQ ID NO: 1410 - protein, 11 aa, Homo sapiens
  peptide 1366
VINTHHRSPST

SEQ ID NO: 1411 - protein, 14 aa, Homo sapiens
  peptide 1367
VNVIIPCLLFSFLT

SEQ ID NO: 1412 - protein, 11 aa, Homo sapiens
  peptide 1368
VPLFSHLQNEQ

SEQ ID NO: 1413 - protein, 14 aa, Homo sapiens
  peptide 1369
YNNADGDFAIVKFT

SEQ ID NO: 1414 - protein, 13 aa, Homo sapiens
  peptide 1370
CCPDTPYLDITYH

SEQ ID NO: 1415 - protein, 13 aa, Homo sapiens
  peptide 1371
CPDTPYLDITYHF

SEQ ID NO: 1416 - protein, 7 aa, Homo sapiens
  peptide 1372
FLLVIVE

SEQ ID NO: 1417 - protein, 13 aa, Homo sapiens
  peptide 1373
GLQLIQLINVDEV

SEQ ID NO: 1418 - protein, 13 aa, Homo sapiens
  peptide 1374
GSVVAINPESDQP

SEQ ID NO: 1419 - protein, 13 aa, Homo sapiens
  peptide 1375
HSVTYSCCPDTPY

SEQ ID NO: 1420 - protein, 13 aa, Homo sapiens
  peptide 1376
INVDEVNQIVTTN

SEQ ID NO: 1421 - protein, 13 aa, Homo sapiens
  peptide 1377
KRPSREKQDKKIF

SEQ ID NO: 1422 - protein, 13 aa, Homo sapiens
  peptide 1378
LQLIQLINVDEVN

SEQ ID NO: 1423 - protein, 13 aa, Homo sapiens
  peptide 1379
LSNFMESGEWVIK

SEQ ID NO: 1424 - protein, 13 aa, Homo sapiens
  peptide 1380
NVDEVNQIVTTNV

SEQ ID NO: 1425 - protein, 13 aa, Homo sapiens
  peptide 1381
NVIIPCLLFSFLT

SEQ ID NO: 1426 - protein, 10 aa, Homo sapiens
  peptide 1382
PDTPYLDITY

SEQ ID NO: 1427 - protein, 13 aa, Homo sapiens
  peptide 1383
SCCPDTPYLDITY

SEQ ID NO: 1428 - protein, 13 aa, Homo sapiens
  peptide 1384
SVVAINPESDQPD

SEQ ID NO: 1429 - protein, 13 aa, Homo sapiens
  peptide 1385
TYSCCPDTPYLDI

SEQ ID NO: 1430 - protein, 13 aa, Homo sapiens
  peptide 1386
VCIIGTLAVFAGR

SEQ ID NO: 1431 - protein, 13 aa, Homo sapiens
  peptide 1387
VTYSCCPDTPYLD

SEQ ID NO: 1432 - protein, 13 aa, Homo sapiens
  peptide 1388
YSCCPDTPYLDIT

SEQ ID NO: 1433 - protein, 14 aa, Homo sapiens
  peptide 1389
AAAAPLLVAVAALL

SEQ ID NO: 1434 - protein, 14 aa, Homo sapiens
  peptide 1390
APESEELEMEFEDM

SEQ ID NO: 1435 - protein, 11 aa, Homo sapiens
  peptide 1391
CSISVTYFPFD

SEQ ID NO: 1436 - protein, 11 aa, Homo sapiens
  peptide 1392
DGQTIEWIFID

SEQ ID NO: 1437 - protein, 11 aa, Homo sapiens
  peptide 1393
DPNLRPAERDS

SEQ ID NO: 1438 - protein, 11 aa, Homo sapiens
  peptide 1394
EERLLADLMQN

SEQ ID NO: 1439 - protein, 11 aa, Homo sapiens
  peptide 1395
FDNGNEEWFLV

SEQ ID NO: 1440 - protein, 14 aa, Homo sapiens
  peptide 1396
IFQSQTYSTNEIDL

SEQ ID NO: 1441 - protein, 11 aa, Homo sapiens
  peptide 1397
KMLLDPAAPAQ

SEQ ID NO: 1442 - protein, 14 aa, Homo sapiens
  peptide 1398
LAVCLGAQGRNQEE

SEQ ID NO: 1443 - protein, 11 aa, Homo sapiens
  peptide 1399
LGAQGRNQEER

SEQ ID NO: 1444 - protein, 11 aa, Homo sapiens
  peptide 1400
LLDPAAPAQEA

SEQ ID NO: 1445 - protein, 11 aa, Homo sapiens
  peptide 1401
LSQEDGQTIEW

SEQ ID NO: 1446 - protein, 14 aa, Homo sapiens
  peptide 1402
LTNLISLNEREEAL

SEQ ID NO: 1447 - protein, 11 aa, Homo sapiens
  peptide 1403
NQEERLLADLM

SEQ ID NO: 1448 - protein, 11 aa, Homo sapiens
  peptide 1404
NRVPALPFPGD

SEQ ID NO: 1449 - protein, 11 aa, Homo sapiens
  peptide 1405
NYDPNLRPAER

SEQ ID NO: 1450 - protein, 11 aa, Homo sapiens
  peptide 1406
PAKMLLDPAAP

SEQ ID NO: 1451 - protein, 11 aa, Homo sapiens
  peptide 1407
PDIVLENNVDG

SEQ ID NO: 1452 - protein, 14 aa, Homo sapiens
  peptide 1408
PDIVLENNVDGVFE

SEQ ID NO: 1453 - protein, 11 aa, Homo sapiens
  peptide 1409
QTIEWIFIDPE

SEQ ID NO: 1454 - protein, 14 aa, Homo sapiens
  peptide 1410
RHQQSHFDNGNEEW

SEQ ID NO: 1455 - protein, 11 aa, Homo sapiens
  peptide 1411
SHFDNGNEEWF

SEQ ID NO: 1456 - protein, 11 aa, Homo sapiens
  peptide 1412
SKYLTFLLVVT

SEQ ID NO: 1457 - protein, 11 aa, Homo sapiens
  peptide 1413
SQTYSTNEIDL

SEQ ID NO: 1458 - protein, 11 aa, Homo sapiens
  peptide 1414
VDGVFEVALYC

SEQ ID NO: 1459 - protein, 11 aa, Homo sapiens
  peptide 1415
VPALPFPGDPR

SEQ ID NO: 1460 - protein, 14 aa, Homo sapiens
  peptide 1416
VWRPDIVLENNVDG

SEQ ID NO: 1461 - protein, 7 aa, Homo sapiens
  peptide 1417
AALEKLE

SEQ ID NO: 1462 - protein, 13 aa, Homo sapiens
  peptide 1418
DIVLENNVDGVFE

SEQ ID NO: 1463 - protein, 7 aa, Homo sapiens
  peptide 1419
ETSQAVP

SEQ ID NO: 1464 - protein, 13 aa, Homo sapiens
  peptide 1420
FQSQTYSTNEIDL

SEQ ID NO: 1465 - protein, 13 aa, Homo sapiens
  peptide 1421
HFDNGNEEWFLVG

SEQ ID NO: 1466 - protein, 13 aa, Homo sapiens
  peptide 1422
HYNRVPALPFPGD

SEQ ID NO: 1467 - protein, 13 aa, Homo sapiens
  peptide 1423
LLLAVCLGAQGRN

SEQ ID NO: 1468 - protein, 13 aa, Homo sapiens
  peptide 1424
LQLSQEDGQTIEW

SEQ ID NO: 1469 - protein, 7 aa, Homo sapiens
  peptide 1425
LSLFICG

SEQ ID NO: 1470 - protein, 13 aa, Homo sapiens
  peptide 1426
LVAKKVPETSQAV

SEQ ID NO: 1471 - protein, 13 aa, Homo sapiens
  peptide 1427
QWQRQGLVAAALE

SEQ ID NO: 1472 - protein, 13 aa, Homo sapiens
  peptide 1428
RQGLVAAALEKLE

SEQ ID NO: 1473 - protein, 7 aa, Homo sapiens
  peptide 1429
STNEIDL

SEQ ID NO: 1474 - protein, 13 aa, Homo sapiens
  peptide 1430
TIEWIFIDPEAFT

SEQ ID NO: 1475 - protein, 13 aa, Homo sapiens
  peptide 1431
VLENNVDGVFEVA

SEQ ID NO: 1476 - protein, 7 aa, Homo sapiens
  peptide 1432
VVNAVVV

SEQ ID NO: 1477 - protein, 13 aa, Homo sapiens
  peptide 1433
WQRQGLVAAALEK

SEQ ID NO: 1478 - protein, 14 aa, Homo sapiens
  peptide 1434
APDHDVTQERDEVW

SEQ ID NO: 1479 - protein, 11 aa, Homo sapiens
  peptide 1435
CYANETCCDFF

SEQ ID NO: 1480 - protein, 14 aa, Homo sapiens
  peptide 1436
DSQGRNCSTNDSLL

SEQ ID NO: 1481 - protein, 14 aa, Homo sapiens
  peptide 1437
FAITSPFKYQSLLT

SEQ ID NO: 1482 - protein, 14 aa, Homo sapiens
  peptide 1438
NFWCEFWTSIDVLC

SEQ ID NO: 1483 - protein, 14 aa, Homo sapiens
  peptide 1439
NGYSSNGNTGEQSG

SEQ ID NO: 1484 - protein, 14 aa, Homo sapiens
  peptide 1440
QEKENKLLCEDLPG

SEQ ID NO: 1485 - protein, 11 aa, Homo sapiens
  peptide 1441
QGRNCSTNDSL

SEQ ID NO: 1486 - protein, 13 aa, Homo sapiens
  peptide 1442
CLKEHKALKTLGI

SEQ ID NO: 1487 - protein, 13 aa, Homo sapiens
  peptide 1443
DNIDSQGRNCSTN

SEQ ID NO: 1488 - protein, 13 aa, Homo sapiens
  peptide 1444
DSQGRNCSTNDSL

SEQ ID NO: 1489 - protein, 13 aa, Homo sapiens
  peptide 1445
FCLKEHKALKTLG

SEQ ID NO: 1490 - protein, 7 aa, Homo sapiens
  peptide 1446
GRNCSTN

SEQ ID NO: 1491 - protein, 7 aa, Homo sapiens
  peptide 1447
IASSIVS

SEQ ID NO: 1492 - protein, 7 aa, Homo sapiens
  peptide 1448
NCSTNDS

SEQ ID NO: 1493 - protein, 7 aa, Homo sapiens
  peptide 1449
RNCSTND

SEQ ID NO: 1494 - protein, 13 aa, Homo sapiens
  peptide 1450
SLLTKNKARVIIL

SEQ ID NO: 1495 - protein, 7 aa, Homo sapiens
  peptide 1451
TVPSDNI

SEQ ID NO: 1496 - protein, 7 aa, Homo sapiens
  peptide 1452
VLAIVFG

SEQ ID NO: 1497 - protein, 7 aa, Homo sapiens
  peptide 1453
YQSLLTK

SEQ ID NO: 1498 - protein, 14 aa, Homo sapiens
  peptide 1454
AIAAFYLPVIIMTV

SEQ ID NO: 1499 - protein, 11 aa, Homo sapiens
  peptide 1455
APRDPVTENCV

SEQ ID NO: 1500 - protein, 11 aa, Homo sapiens
  peptide 1456
CAPCIPNTVWT

SEQ ID NO: 1501 - protein, 11 aa, Homo sapiens
  peptide 1457
DSCTPTNTTVE

SEQ ID NO: 1502 - protein, 14 aa, Homo sapiens
  peptide 1458
GRIVKPNNNNMPSS

SEQ ID NO: 1503 - protein, 14 aa, Homo sapiens
  peptide 1459
INTFCAPCIPNTVW

SEQ ID NO: 1504 - protein, 14 aa, Homo sapiens
  peptide 1460
ISFDRYFCVTKPLT

SEQ ID NO: 1505 - protein, 14 aa, Homo sapiens
  peptide 1461
IVKPNNNNMPSSDD

SEQ ID NO: 1506 - protein, 14 aa, Homo sapiens
  peptide 1462
KQNIVARKIVKMTK

SEQ ID NO: 1507 - protein, 11 aa, Homo sapiens
  peptide 1463
KVNRHLQTVNN

SEQ ID NO: 1508 - protein, 14 aa, Homo sapiens
  peptide 1464
LFWQFIVGVRTVED

SEQ ID NO: 1509 - protein, 11 aa, Homo sapiens
  peptide 1465
LIISFDRYFCV

SEQ ID NO: 1510 - protein, 14 aa, Homo sapiens
  peptide 1466
LVQGRIVKPNNNNM

SEQ ID NO: 1511 - protein, 14 aa, Homo sapiens
  peptide 1467
MNNSTNSSNNSLAL

SEQ ID NO: 1512 - protein, 14 aa, Homo sapiens
  peptide 1468
MVSIKVNRHLQTVN

SEQ ID NO: 1513 - protein, 11 aa, Homo sapiens
  peptide 1469
NSTNSSNNSLA

SEQ ID NO: 1514 - protein, 11 aa, Homo sapiens
  peptide 1470
PAILFWQFIVG

SEQ ID NO: 1515 - protein, 11 aa, Homo sapiens
  peptide 1471
PCIPNTVWTIG

SEQ ID NO: 1516 - protein, 11 aa, Homo sapiens
  peptide 1472
PVTENCVQGEE

SEQ ID NO: 1517 - protein, 11 aa, Homo sapiens
  peptide 1473
QFIVGVRTVED

SEQ ID NO: 1518 - protein, 14 aa, Homo sapiens
  peptide 1474
QGRIVKPNNNNMPS

SEQ ID NO: 1519 - protein, 14 aa, Homo sapiens
  peptide 1475
QNIVARKIVKMTKQ

SEQ ID NO: 1520 - protein, 11 aa, Homo sapiens
  peptide 1476
SRIKKDKKEPV

SEQ ID NO: 1521 - protein, 11 aa, Homo sapiens
  peptide 1477
SVMNLLIISFD

SEQ ID NO: 1522 - protein, 11 aa, Homo sapiens
  peptide 1478
TENCVQGEEKE

SEQ ID NO: 1523 - protein, 14 aa, Homo sapiens
  peptide 1479
TENCVQGEEKESSN

SEQ ID NO: 1524 - protein, 14 aa, Homo sapiens
  peptide 1480
TFCAPCIPNTVWTI

SEQ ID NO: 1525 - protein, 14 aa, Homo sapiens
  peptide 1481
TPKSDSCTPTNTTV

SEQ ID NO: 1526 - protein, 14 aa, Homo sapiens
  peptide 1482
TVEVVGSSGQNGDE

SEQ ID NO: 1527 - protein, 11 aa, Homo sapiens
  peptide 1483
VCDLWLALDYV

SEQ ID NO: 1528 - protein, 14 aa, Homo sapiens
  peptide 1484
VLVAGSLSLVTIIG

SEQ ID NO: 1529 - protein, 14 aa, Homo sapiens
  peptide 1485
VSIKVNRHLQTVNN

SEQ ID NO: 1530 - protein, 11 aa, Homo sapiens
  peptide 1486
WPLGPVVCDLW

SEQ ID NO: 1531 - protein, 13 aa, Homo sapiens
  peptide 1487
IVKMTKQPAKKKP

SEQ ID NO: 1532 - protein, 13 aa, Homo sapiens
  peptide 1488
KIVKMTKQPAKKK

SEQ ID NO: 1533 - protein, 13 aa, Homo sapiens
  peptide 1489
LFWQFIVGVRTVE

SEQ ID NO: 1534 - protein, 13 aa, Homo sapiens
  peptide 1490
NNNNMPSSDDGLE

SEQ ID NO: 1535 - protein, 7 aa, Homo sapiens
  peptide 1491
NNSTNSS

SEQ ID NO: 1536 - protein, 7 aa, Homo sapiens
  peptide 1492
NSTNSSN

SEQ ID NO: 1537 - protein, 13 aa, Homo sapiens
  peptide 1493
NSTNSSNNSLALT

SEQ ID NO: 1538 - protein, 13 aa, Homo sapiens
  peptide 1494
RKIVKMTKQPAKK

SEQ ID NO: 1539 - protein, 13 aa, Homo sapiens
  peptide 1495
SRASKSRIKKDKK

SEQ ID NO: 1540 - protein, 13 aa, Homo sapiens
  peptide 1496
STNSSNNSLALTS

SEQ ID NO: 1541 - protein, 7 aa, Homo sapiens
  peptide 1497
TNSSNNS

SEQ ID NO: 1542 - protein, 13 aa, Homo sapiens
  peptide 1498
VKPNNNNMPSSDD

SEQ ID NO: 1543 - protein, 7 aa, Homo sapiens
  peptide 1499
WTIGYWL

SEQ ID NO: 1544 - protein, 7 aa, Homo sapiens
  peptide 1500
YINSTIN

SEQ ID NO: 1545 - protein, 11 aa, Homo sapiens
  peptide 1501
AFYLPVVIMTV

SEQ ID NO: 1546 - protein, 11 aa, Homo sapiens
  peptide 1502
AKTLAFLKSPL

SEQ ID NO: 1547 - protein, 11 aa, Homo sapiens
  peptide 1503
EATTPAMPAPP

SEQ ID NO: 1548 - protein, 11 aa, Homo sapiens
  peptide 1504
EMVFIATVTGS

SEQ ID NO: 1549 - protein, 14 aa, Homo sapiens
  peptide 1505
ETVEMVFIATVTGS

SEQ ID NO: 1550 - protein, 14 aa, Homo sapiens
  peptide 1506
LSIKVNRQLQTVNN

SEQ ID NO: 1551 - protein, 14 aa, Homo sapiens
  peptide 1507
LSTTEATTPAMPAP

SEQ ID NO: 1552 - protein, 14 aa, Homo sapiens
  peptide 1508
NRYETVEMVFIATV

SEQ ID NO: 1553 - protein, 11 aa, Homo sapiens
  peptide 1509
TVEMVFIATVT

SEQ ID NO: 1554 - protein, 11 aa, Homo sapiens
  peptide 1510
VNRQLQTVNNY

SEQ ID NO: 1555 - protein, 11 aa, Homo sapiens
  peptide 1511
WTPYNVMVLVN

SEQ ID NO: 1556 - protein, 7 aa, Homo sapiens
  peptide 1512
AKTLAFL

SEQ ID NO: 1557 - protein, 7 aa, Homo sapiens
  peptide 1513
DKDTSNE

SEQ ID NO: 1558 - protein, 7 aa, Homo sapiens
  peptide 1514
KDTSNES

SEQ ID NO: 1559 - protein, 13 aa, Homo sapiens
  peptide 1515
LYTVYIIKGYWPL

SEQ ID NO: 1560 - protein, 13 aa, Homo sapiens
  peptide 1516
RNQVRKKRQMAAR

SEQ ID NO: 1561 - protein, 13 aa, Homo sapiens
  peptide 1517
RYETVEMVFIATV

SEQ ID NO: 1562 - protein, 7 aa, Homo sapiens
  peptide 1518
SATQNTK

SEQ ID NO: 1563 - protein, 13 aa, Homo sapiens
  peptide 1519
YETVEMVFIATVT

SEQ ID NO: 1564 - protein, 14 aa, Homo sapiens
  peptide 1520
EYGSFFCELWTSVD

SEQ ID NO: 1565 - protein, 14 aa, Homo sapiens
  peptide 1521
LAITSPFRYQSLLT

SEQ ID NO: 1566 - protein, 11 aa, Homo sapiens
  peptide 1522
LVALREQKALK

SEQ ID NO: 1567 - protein, 11 aa, Homo sapiens
  peptide 1523
PGAASDDDDDD

SEQ ID NO: 1568 - protein, 11 aa, Homo sapiens
  peptide 1524
PPSPSPSPVPA

SEQ ID NO: 1569 - protein, 11 aa, Homo sapiens
  peptide 1525
RARARGLVCTV

SEQ ID NO: 1570 - protein, 11 aa, Homo sapiens
  peptide 1526
SFFCELWTSVD

SEQ ID NO: 1571 - protein, 11 aa, Homo sapiens
  peptide 1527
VWAISALVSFL

SEQ ID NO: 1572 - protein, 11 aa, Homo sapiens
  peptide 1528
WEYGSFFCELW

SEQ ID NO: 1573 - protein, 7 aa, Homo sapiens
  peptide 1529
ARLLEPW

SEQ ID NO: 1574 - protein, 7 aa, Homo sapiens
  peptide 1530
ARLLVPA

SEQ ID NO: 1575 - protein, 13 aa, Homo sapiens
  peptide 1531
DVVGATPPARLLE

SEQ ID NO: 1576 - protein, 7 aa, Homo sapiens
  peptide 1532
LPPASES

SEQ ID NO: 1577 - protein, 7 aa, Homo sapiens
  peptide 1533
PPARLLE

SEQ ID NO: 1578 - protein, 13 aa, Homo sapiens
  peptide 1534
QQWTAGMGLLMAL

SEQ ID NO: 1579 - protein, 13 aa, Homo sapiens
  peptide 1535
RLLCCARRAARRR

SEQ ID NO: 1580 - protein, 13 aa, Homo sapiens
  peptide 1536
SFFCELWTSVDVL

SEQ ID NO: 1581 - protein, 14 aa, Homo sapiens
  peptide 1537
RAARFRIRKTVKKV

SEQ ID NO: 1582 - protein, 11 aa, Homo sapiens
  peptide 1538
AQRERNQASWS

SEQ ID NO: 1583 - protein, 14 aa, Homo sapiens
  peptide 1539
CLRCPRPTLAQRER

SEQ ID NO: 1584 - protein, 11 aa, Homo sapiens
  peptide 1540
CWQYLVGKRTV

SEQ ID NO: 1585 - protein, 11 aa, Homo sapiens
  peptide 1541
DSYHNATTVNG

SEQ ID NO: 1586 - protein, 11 aa, Homo sapiens
  peptide 1542
EDEDKPATDPV

SEQ ID NO: 1587 - protein, 14 aa, Homo sapiens
  peptide 1543
GEEFSAEETEETFV

SEQ ID NO: 1588 - protein, 11 aa, Homo sapiens
  peptide 1544
GKRTVPLDECQ

SEQ ID NO: 1589 - protein, 11 aa, Homo sapiens
  peptide 1545
GTPVNHQPLER

SEQ ID NO: 1590 - protein, 11 aa, Homo sapiens
  peptide 1546
KPATDPVLQVV

SEQ ID NO: 1591 - protein, 14 aa, Homo sapiens
  peptide 1547
KRTKDLADLQGSDS

SEQ ID NO: 1592 - protein, 14 aa, Homo sapiens
  peptide 1548
LGYWLCYVNSTVNP

SEQ ID NO: 1593 - protein, 11 aa, Homo sapiens
  peptide 1549
NLLVISFDRYF

SEQ ID NO: 1594 - protein, 11 aa, Homo sapiens
  peptide 1550
PICYALCNRTF

SEQ ID NO: 1595 - protein, 14 aa, Homo sapiens
  peptide 1551
QGKESPGEEFSAEE

SEQ ID NO: 1596 - protein, 14 aa, Homo sapiens
  peptide 1552
QYLVGKRTVPLDEC

SEQ ID NO: 1597 - protein, 14 aa, Homo sapiens
  peptide 1553
RKTFKMLLLCRWKK

SEQ ID NO: 1598 - protein, 11 aa, Homo sapiens
  peptide 1554
TEETFVKAETE

SEQ ID NO: 1599 - protein, 11 aa, Homo sapiens
  peptide 1555
TLAQRERNQAS

SEQ ID NO: 1600 - protein, 14 aa, Homo sapiens
  peptide 1556
TVNGTPVNHQPLER

SEQ ID NO: 1601 - protein, 11 aa, Homo sapiens
  peptide 1557
WALGSLACDLW

SEQ ID NO: 1602 - protein, 7 aa, Homo sapiens
  peptide 1558
AETEKSD

SEQ ID NO: 1603 - protein, 13 aa, Homo sapiens
  peptide 1559
ALFRSCLRCPRPT

SEQ ID NO: 1604 - protein, 13 aa, Homo sapiens
  peptide 1560
ASWSSSRRSTSTT

SEQ ID NO: 1605 - protein, 7 aa, Homo sapiens
  peptide 1561
DPVLQVV

SEQ ID NO: 1606 - protein, 13 aa, Homo sapiens
  peptide 1562
EEFSAEETEETFV

SEQ ID NO: 1607 - protein, 13 aa, Homo sapiens
  peptide 1563
EFSAEETEETFVK

SEQ ID NO: 1608 - protein, 13 aa, Homo sapiens
  peptide 1564
FKMLLLCRWKKKK

SEQ ID NO: 1609 - protein, 13 aa, Homo sapiens
  peptide 1565
FRSCLRCPRPTLA

SEQ ID NO: 1610 - protein, 13 aa, Homo sapiens
  peptide 1566
FSAEETEETFVKA

SEQ ID NO: 1611 - protein, 13 aa, Homo sapiens
  peptide 1567
GKRTVPLDECQIQ

SEQ ID NO: 1612 - protein, 13 aa, Homo sapiens
  peptide 1568
GYWLCYVNSTVNP

SEQ ID NO: 1613 - protein, 13 aa, Homo sapiens
  peptide 1569
KMLLLCRWKKKKV

SEQ ID NO: 1614 - protein, 13 aa, Homo sapiens
  peptide 1570
KPAHRALFRSCLR

SEQ ID NO: 1615 - protein, 13 aa, Homo sapiens
  peptide 1571
LYTTYILMGRWAL

SEQ ID NO: 1616 - protein, 13 aa, Homo sapiens
  peptide 1572
SPGEEFSAEETEE

SEQ ID NO: 1617 - protein, 13 aa, Homo sapiens
  peptide 1573
SSYPSSEDEDKPA

SEQ ID NO: 1618 - protein, 13 aa, Homo sapiens
  peptide 1574
SYPSSEDEDKPAT

SEQ ID NO: 1619 - protein, 13 aa, Homo sapiens
  peptide 1575
TCSSYPSSEDEDK

SEQ ID NO: 1620 - protein, 7 aa, Homo sapiens
  peptide 1576
VNSTVNP

SEQ ID NO: 1621 - protein, 7 aa, Homo sapiens
  peptide 1577
YVNSTVN

SEQ ID NO: 1622 - protein, 13 aa, Homo sapiens
  peptide 1578
YWLCYVNSTVNPI

SEQ ID NO: 1623 - protein, 11 aa, Homo sapiens
  peptide 1579
AWCEIYLALDV

SEQ ID NO: 1624 - protein, 11 aa, Homo sapiens
  peptide 1580
DSLPRRGPGAT

SEQ ID NO: 1625 - protein, 14 aa, Homo sapiens
  peptide 1581
HAERPPGPRRPERG

SEQ ID NO: 1626 - protein, 14 aa, Homo sapiens
  peptide 1582
ISLDRYWSITQAIE

SEQ ID NO: 1627 - protein, 14 aa, Homo sapiens
  peptide 1583
KFFFWFGYCNSSLN

SEQ ID NO: 1628 - protein, 14 aa, Homo sapiens
  peptide 1584
LALDVLFCTSSIVH

SEQ ID NO: 1629 - protein, 11 aa, Homo sapiens
  peptide 1585
PMGSLQPDAGN

SEQ ID NO: 1630 - protein, 11 aa, Homo sapiens
  peptide 1586
PPGGTERRPNG

SEQ ID NO: 1631 - protein, 14 aa, Homo sapiens
  peptide 1587
SSDHAERPPGPRRP

SEQ ID NO: 1632 - protein, 14 aa, Homo sapiens
  peptide 1588
SSIVHLCAISLDRY

SEQ ID NO: 1633 - protein, 11 aa, Homo sapiens
  peptide 1589
TERRPNGLGPE

SEQ ID NO: 1634 - protein, 11 aa, Homo sapiens
  peptide 1590
VHLCAISLDRY

SEQ ID NO: 1635 - protein, 11 aa, Homo sapiens
  peptide 1591
YTIFNHDFRRA

SEQ ID NO: 1636 - protein, 7 aa, Homo sapiens
  peptide 1592
ALDLEES

SEQ ID NO: 1637 - protein, 13 aa, Homo sapiens
  peptide 1593
ATLVIPFSLANEV

SEQ ID NO: 1638 - protein, 7 aa, Homo sapiens
  peptide 1594
DFRRAFK

SEQ ID NO: 1639 - protein, 7 aa, Homo sapiens
  peptide 1595
FSLANEV

SEQ ID NO: 1640 - protein, 7 aa, Homo sapiens
  peptide 1596
GAEAEPL

SEQ ID NO: 1641 - protein, 11 aa, Homo sapiens
  peptide 1597
AYSWKEEEEED

SEQ ID NO: 1642 - protein, 14 aa, Homo sapiens
  peptide 1598
CKDCVPETLWELGY

SEQ ID NO: 1643 - protein, 14 aa, Homo sapiens
  peptide 1599
CVPETLWELGYWLC

SEQ ID NO: 1644 - protein, 11 aa, Homo sapiens
  peptide 1600
GSEVVIKMPMV

SEQ ID NO: 1645 - protein, 14 aa, Homo sapiens
  peptide 1601
GYWLCYVNSTINPM

SEQ ID NO: 1646 - protein, 14 aa, Homo sapiens
  peptide 1602
KQPPRSSPNTVKRP

SEQ ID NO: 1647 - protein, 14 aa, Homo sapiens
  peptide 1603
LLQAYSWKEEEEED

SEQ ID NO: 1648 - protein, 11 aa, Homo sapiens
  peptide 1604
LQAYSWKEEEE

SEQ ID NO: 1649 - protein, 14 aa, Homo sapiens
  peptide 1605
NLLVLISFKVNTEL

SEQ ID NO: 1650 - protein, 11 aa, Homo sapiens
  peptide 1606
SEGEEPGSEVV

SEQ ID NO: 1651 - protein, 11 aa, Homo sapiens
  peptide 1607
SWKEEEEEDEG

SEQ ID NO: 1652 - protein, 7 aa, Homo sapiens
  peptide 1608
EEEEEDE

SEQ ID NO: 1653 - protein, 13 aa, Homo sapiens
  peptide 1609
EEEEEDEGSMESL

SEQ ID NO: 1654 - protein, 7 aa, Homo sapiens
  peptide 1610
KEEEEED

SEQ ID NO: 1655 - protein, 7 aa, Homo sapiens
  peptide 1611
LLQAYSW

SEQ ID NO: 1656 - protein, 13 aa, Homo sapiens
  peptide 1612
QAYSWKEEEEEDE

SEQ ID NO: 1657 - protein, 13 aa, Homo sapiens
  peptide 1613
RPLSYRAKRTPRR

SEQ ID NO: 1658 - protein, 7 aa, Homo sapiens
  peptide 1614
SLTSSEG

SEQ ID NO: 1659 - protein, 7 aa, Homo sapiens
  peptide 1615
WKEEEEE

SEQ ID NO: 1660 - protein, 11 aa, Homo sapiens
  peptide 1616
GLGPDGQGHQE

SEQ ID NO: 1661 - protein, 14 aa, Homo sapiens
  peptide 1617
LKRPKPERDLMPEP

SEQ ID NO: 1662 - protein, 14 aa, Homo sapiens
  peptide 1618
YLDLEWTDYRLSWD

SEQ ID NO: 1663 - protein, 13 aa, Homo sapiens
  peptide 1619
AVALLPELREVVS

SEQ ID NO: 1664 - protein, 7 aa, Homo sapiens
  peptide 1620
CTMVFSS

SEQ ID NO: 1665 - protein, 7 aa, Homo sapiens
  peptide 1621
HEGTFIE

SEQ ID NO: 1666 - protein, 7 aa, Homo sapiens
  peptide 1622
LAPGVRG

SEQ ID NO: 1667 - protein, 13 aa, Homo sapiens
  peptide 1623
SYSYDSSEVSLQT

SEQ ID NO: 1668 - protein, 7 aa, Homo sapiens
  peptide 1624
TPGALLM

SEQ ID NO: 1669 - protein, 7 aa, Homo sapiens
  peptide 1625
WTFIIFT

SEQ ID NO: 1670 - protein, 11 aa, Homo sapiens
  peptide 1626
ATGCELWTSVD

SEQ ID NO: 1671 - protein, 11 aa, Homo sapiens
  peptide 1627
GLIMGTFTLCW

SEQ ID NO: 1672 - protein, 11 aa, Homo sapiens
  peptide 1628
LPTLAPNTANT

SEQ ID NO: 1673 - protein, 11 aa, Homo sapiens
  peptide 1629
RALGGPSLVPG

SEQ ID NO: 1674 - protein, 11 aa, Homo sapiens
  peptide 1630
SRSLAPAPVGT

SEQ ID NO: 1675 - protein, 11 aa, Homo sapiens
  peptide 1631
VDRYLAVTNPL

SEQ ID NO: 1676 - protein, 14 aa, Homo sapiens
  peptide 1632
VGADAEAQRCHSNP

SEQ ID NO: 1677 - protein, 7 aa, Homo sapiens
  peptide 1633
RYGALVT

SEQ ID NO: 1678 - protein, 14 aa, Homo sapiens
  peptide 1634
IKIYIVLRRRRKRV

SEQ ID NO: 1679 - protein, 14 aa, Homo sapiens
  peptide 1635
LVYIKIYIVLRRRR

SEQ ID NO: 1680 - protein, 14 aa, Homo sapiens
  peptide 1636
HGLHSTPDSPAKPE

SEQ ID NO: 1681 - protein, 14 aa, Homo sapiens
  peptide 1637
IVLRRRRKRVNTKR

SEQ ID NO: 1682 - protein, 14 aa, Homo sapiens
  peptide 1638
KIYIVLRRRRKRVN

SEQ ID NO: 1683 - protein, 14 aa, Homo sapiens
  peptide 1639
MPNGKTRTSLKTMS

SEQ ID NO: 1684 - protein, 14 aa, Homo sapiens
  peptide 1640
RRRRKRVNTKRSSR

SEQ ID NO: 1685 - protein, 14 aa, Homo sapiens
  peptide 1641
VYIKIYIVLRRRRK

SEQ ID NO: 1686 - protein, 14 aa, Homo sapiens
  peptide 1642
AVCYAFVFSALIEF

SEQ ID NO: 1687 - protein, 14 aa, Homo sapiens
  peptide 1643
ECPMHLEDFPMDAH

SEQ ID NO: 1688 - protein, 14 aa, Homo sapiens
  peptide 1644
KVAYATAMDWFIAV

SEQ ID NO: 1689 - protein, 14 aa, Homo sapiens
  peptide 1645
YFVIQTYLPCIMTV

SEQ ID NO: 1690 - protein, 14 aa, Homo sapiens
  peptide 1646
FTKRGYAWDGKSVV

SEQ ID NO: 1691 - protein, 14 aa, Homo sapiens
  peptide 1647
FNVYIESDAWQEKD

SEQ ID NO: 1692 - protein, 14 aa, Homo sapiens
  peptide 1648
AILYYYQSGGRLRR

SEQ ID NO: 1693 - protein, 14 aa, Homo sapiens
  peptide 1649
DENEDMHGSGVTFH

SEQ ID NO: 1694 - protein, 14 aa, Homo sapiens
  peptide 1650
DYMEIQEGVNNSNE

SEQ ID NO: 1695 - protein, 14 aa, Homo sapiens
  peptide 1651
EDMHGSGVTFHTYS

SEQ ID NO: 1696 - protein, 14 aa, Homo sapiens
  peptide 1652
EGVNNSNEDFREEN

SEQ ID NO: 1697 - protein, 14 aa, Homo sapiens
  peptide 1653
EIQEGVNNSNEDFR

SEQ ID NO: 1698 - protein, 14 aa, Homo sapiens
  peptide 1654
EMFREDEGYIKEEE

SEQ ID NO: 1699 - protein, 14 aa, Homo sapiens
  peptide 1655
FRIFKLSRHSKGLQ

SEQ ID NO: 1700 - protein, 14 aa, Homo sapiens
  peptide 1656
FYELGEEAMEMFRE

SEQ ID NO: 1701 - protein, 14 aa, Homo sapiens
  peptide 1657
ISIVSFCLETLPIF

SEQ ID NO: 1702 - protein, 14 aa, Homo sapiens
  peptide 1658
KLSRHSKGLQILGQ

SEQ ID NO: 1703 - protein, 14 aa, Homo sapiens
  peptide 1659
PQDTYDPEADHECC

SEQ ID NO: 1704 - protein, 14 aa, Homo sapiens
  peptide 1660
MEIQEGVNNSNEDF

SEQ ID NO: 1705 - protein, 14 aa, Homo sapiens
  peptide 1661
SDYMEIQEGVNNSN

SEQ ID NO: 1706 - protein, 14 aa, Homo sapiens
  peptide 1662
VNNSNEDFREENLK

SEQ ID NO: 1707 - protein, 14 aa, Homo sapiens
  peptide 1663
FLHLTRADLSYPSH

SEQ ID NO: 1708 - protein, 14 aa, Homo sapiens
  peptide 1664
YVFFEEQEDEIIGF

SEQ ID NO: 1709 - protein, 14 aa, Homo sapiens
  peptide 1665
EYPESSGPARGIAI

SEQ ID NO: 1710 - protein, 14 aa, Homo sapiens
  peptide 1666
GGSFFTDPFFLVET

SEQ ID NO: 1711 - protein, 14 aa, Homo sapiens
  peptide 1667
GVSRVSPVSRGSQE

SEQ ID NO: 1712 - protein, 14 aa, Homo sapiens
  peptide 1668
LAAPGEVRGPEGEQ

SEQ ID NO: 1713 - protein, 14 aa, Homo sapiens
  peptide 1669
LRATDNGLGKPDFP

SEQ ID NO: 1714 - protein, 14 aa, Homo sapiens
  peptide 1670
PVSRGSQEEEEDED

SEQ ID NO: 1715 - protein, 14 aa, Homo sapiens
  peptide 1671
QEEEEDEDDSYTFH

SEQ ID NO: 1716 - protein, 14 aa, Homo sapiens
  peptide 1672
REDEGCLPEGGEDE

SEQ ID NO: 1717 - protein, 14 aa, Homo sapiens
  peptide 1673
RGSQEEEEDEDDSY

SEQ ID NO: 1718 - protein, 14 aa, Homo sapiens
  peptide 1674
SQPFQRQVWLLFEY

SEQ ID NO: 1719 - protein, 14 aa, Homo sapiens
  peptide 1675
STLGGSFFTDPFFL

SEQ ID NO: 1720 - protein, 14 aa, Homo sapiens
  peptide 1676
ERLVINISGLRFET

SEQ ID NO: 1721 - protein, 14 aa, Homo sapiens
  peptide 1677
RSEKSLTLAAPGEV

SEQ ID NO: 1722 - protein, 14 aa, Homo sapiens
  peptide 1678
SQEEEEDEDDSYTF

SEQ ID NO: 1723 - protein, 14 aa, Homo sapiens
  peptide 1679
YFAEADDDDSLFPS

SEQ ID NO: 1724 - protein, 11 aa, Homo sapiens
  peptide 1680
ACKIEVKHFPF

SEQ ID NO: 1725 - protein, 11 aa, Homo sapiens
  peptide 1681
AGAFGAEPAPV

SEQ ID NO: 1726 - protein, 11 aa, Homo sapiens
  peptide 1682
CARQRLRLRRR

SEQ ID NO: 1727 - protein, 11 aa, Homo sapiens
  peptide 1683
CGEKMTLCISV

SEQ ID NO: 1728 - protein, 11 aa, Homo sapiens
  peptide 1684
EKMTLCISVLL

SEQ ID NO: 1729 - protein, 11 aa, Homo sapiens
  peptide 1685
GPVALLLGFGL

SEQ ID NO: 1730 - protein, 14 aa, Homo sapiens
  peptide 1686
ISVHEREQIMTTNV

SEQ ID NO: 1731 - protein, 14 aa, Homo sapiens
  peptide 1687
KVRLPSKHIWLPDV

SEQ ID NO: 1732 - protein, 14 aa, Homo sapiens
  peptide 1688
MTTNVWLTQEWEDY

SEQ ID NO: 1733 - protein, 11 aa, Homo sapiens
  peptide 1689
PPAIYKSACKI

SEQ ID NO: 1734 - protein, 14 aa, Homo sapiens
  peptide 1690
QRLRLRRRQREREG

SEQ ID NO: 1735 - protein, 11 aa, Homo sapiens
  peptide 1691
RLRRRQREREG

SEQ ID NO: 1736 - protein, 11 aa, Homo sapiens
  peptide 1692
RQRLRLRRRQR

SEQ ID NO: 1737 - protein, 11 aa, Homo sapiens
  peptide 1693
RSWTYDRTEID

SEQ ID NO: 1738 - protein, 14 aa, Homo sapiens
  peptide 1694
VASLDDFTPSGEWD

SEQ ID NO: 1739 - protein, 11 aa, Homo sapiens
  peptide 1695
VHEREQIMTTN

SEQ ID NO: 1740 - protein, 14 aa, Homo sapiens
  peptide 1696
VSLAQLISVHEREQ

SEQ ID NO: 1741 - protein, 14 aa, Homo sapiens
  peptide 1697
WTYDRTEIDLVLKS

SEQ ID NO: 1742 - protein, 11 aa, Homo sapiens
  peptide 1698
YDRTEIDLVLK

SEQ ID NO: 1743 - protein, 13 aa, Homo sapiens
  peptide 1699
CARQRLRLRRRQR

SEQ ID NO: 1744 - protein, 7 aa, Homo sapiens
  peptide 1700
GAEPAPV

SEQ ID NO: 1745 - protein, 13 aa, Homo sapiens
  peptide 1701
GLAGAFGAEPAPV

SEQ ID NO: 1746 - protein, 13 aa, Homo sapiens
  peptide 1702
HHCARQRLRLRRR

SEQ ID NO: 1747 - protein, 13 aa, Homo sapiens
  peptide 1703
ISVHEREQIMTTN

SEQ ID NO: 1748 - protein, 7 aa, Homo sapiens
  peptide 1704
NAVVSYD

SEQ ID NO: 1749 - protein, 13 aa, Homo sapiens
  peptide 1705
RHHCARQRLRLRR

SEQ ID NO: 1750 - protein, 11 aa, Homo sapiens
  peptide 1706
AAITFLILFTI

SEQ ID NO: 1751 - protein, 11 aa, Homo sapiens
  peptide 1707
ASPEDEAEEEE

SEQ ID NO: 1752 - protein, 14 aa, Homo sapiens
  peptide 1708
CGASPEDEAEEEEE

SEQ ID NO: 1753 - protein, 14 aa, Homo sapiens
  peptide 1709
EEEEEECEPQAVPV

SEQ ID NO: 1754 - protein, 11 aa, Homo sapiens
  peptide 1710
EEEEEEECEPQ

SEQ ID NO: 1755 - protein, 11 aa, Homo sapiens
  peptide 1711
EEEEEEEECEP

SEQ ID NO: 1756 - protein, 14 aa, Homo sapiens
  peptide 1712
EEEEEEEEECEPQA

SEQ ID NO: 1757 - protein, 11 aa, Homo sapiens
  peptide 1713
GASPEDEAEEE

SEQ ID NO: 1758 - protein, 11 aa, Homo sapiens
  peptide 1714
PEDEAEEEEEE

SEQ ID NO: 1759 - protein, 14 aa, Homo sapiens
  peptide 1715
SGQGQKEGVCGASP

SEQ ID NO: 1760 - protein, 11 aa, Homo sapiens
  peptide 1716
SPEDEAEEEEE

SEQ ID NO: 1761 - protein, 11 aa, Homo sapiens
  peptide 1717
STGEKEEGETP

SEQ ID NO: 1762 - protein, 7 aa, Homo sapiens
  peptide 1718
AEEEEEE

SEQ ID NO: 1763 - protein, 13 aa, Homo sapiens
  peptide 1719
AEEEEEEEEEEEE

SEQ ID NO: 1764 - protein, 13 aa, Homo sapiens
  peptide 1720
DEAEEEEEEEEEE

SEQ ID NO: 1765 - protein, 7 aa, Homo sapiens
  peptide 1721
EAEEEEE

SEQ ID NO: 1766 - protein, 13 aa, Homo sapiens
  peptide 1722
EAEEEEEEEEEEE

SEQ ID NO: 1767 - protein, 13 aa, Homo sapiens
  peptide 1723
EDEAEEEEEEEEE

SEQ ID NO: 1768 - protein, 7 aa, Homo sapiens
  peptide 1724
EEEEECE

SEQ ID NO: 1769 - protein, 7 aa, Homo sapiens
  peptide 1725
EEEEEEC

SEQ ID NO: 1770 - protein, 13 aa, Homo sapiens
  peptide 1726
EEEEEEEECEPQA

SEQ ID NO: 1771 - protein, 13 aa, Homo sapiens
  peptide 1727
EEEEEEEEECEPQ

SEQ ID NO: 1772 - protein, 13 aa, Homo sapiens
  peptide 1728
EEEEEEEEEECEP

SEQ ID NO: 1773 - protein, 13 aa, Homo sapiens
  peptide 1729
EEEEEEEEEEECE

SEQ ID NO: 1774 - protein, 13 aa, Homo sapiens
  peptide 1730
EEEEEEEEEEEEC

SEQ ID NO: 1775 - protein, 7 aa, Homo sapiens
  peptide 1731
GEKEEGE

SEQ ID NO: 1776 - protein, 7 aa, Homo sapiens
  peptide 1732
GQKEGVC

SEQ ID NO: 1777 - protein, 13 aa, Homo sapiens
  peptide 1733
IILTVWLIAAVIS

SEQ ID NO: 1778 - protein, 7 aa, Homo sapiens
  peptide 1734
IYTIFNQ

SEQ ID NO: 1779 - protein, 13 aa, Homo sapiens
  peptide 1735
NSGQGQKEGVCGA

SEQ ID NO: 1780 - protein, 13 aa, Homo sapiens
  peptide 1736
PEDEAEEEEEEEE

SEQ ID NO: 1781 - protein, 13 aa, Homo sapiens
  peptide 1737
RALPPSWAALPNS

SEQ ID NO: 1782 - protein, 7 aa, Homo sapiens
  peptide 1738
RAQLTRE

SEQ ID NO: 1783 - protein, 7 aa, Homo sapiens
  peptide 1739
RGRPQCK

SEQ ID NO: 1784 - protein, 13 aa, Homo sapiens
  peptide 1740
SPEDEAEEEEEEE

SEQ ID NO: 1785 - protein, 7 aa, Homo sapiens
  peptide 1741
TGEKEEG

SEQ ID NO: 1786 - protein, 7 aa, Homo sapiens
  peptide 1742
TIFNQDF

SEQ ID NO: 1787 - protein, 13 aa, Homo sapiens
  peptide 1743
VNGHSKSTGEKEE

SEQ ID NO: 1788 - protein, 13 aa, Homo sapiens
  peptide 1744
WAALPNSGQGQKE

SEQ ID NO: 1789 - protein, 14 aa, Homo sapiens
  peptide 1745
ETLPKIPYVKAIDI

SEQ ID NO: 1790 - protein, 14 aa, Homo sapiens
  peptide 1746
IDVASIDMVSEVNM

SEQ ID NO: 1791 - protein, 14 aa, Homo sapiens
  peptide 1747
LRPDFGGPPVDVGM

SEQ ID NO: 1792 - protein, 14 aa, Homo sapiens
  peptide 1748
PLDEQNCTLEIESY

SEQ ID NO: 1793 - protein, 14 aa, Homo sapiens
  peptide 1749
VCCAHSTNEPSNMS

SEQ ID NO: 1794 - protein, 14 aa, Homo sapiens
  peptide 1750
AARVALGITTVLTM

SEQ ID NO: 1795 - protein, 14 aa, Homo sapiens
  peptide 1751
GCFVFVFLALLEYA

SEQ ID NO: 1796 - protein, 14 aa, Homo sapiens
  peptide 1752
YDIRLRPDFGGPPV

SEQ ID NO: 1797 - protein, 14 aa, Homo sapiens
  peptide 1753
ATHLQERDEEYGYE

SEQ ID NO: 1798 - protein, 14 aa, Homo sapiens
  peptide 1754
DAECQLQLHNFPMD

SEQ ID NO: 1799 - protein, 14 aa, Homo sapiens
  peptide 1755
DAVPARTSLGITTV

SEQ ID NO: 1800 - protein, 14 aa, Homo sapiens
  peptide 1756
KKNPAPTIDIRPRS

SEQ ID NO: 1801 - protein, 14 aa, Homo sapiens
  peptide 1757
KVSYVTAMDLFVSV

SEQ ID NO: 1802 - protein, 14 aa, Homo sapiens
  peptide 1758
LDGKDCASFFCCFE

SEQ ID NO: 1803 - protein, 14 aa, Homo sapiens
  peptide 1759
LIHTDMYVNSIGPV

SEQ ID NO: 1804 - protein, 14 aa, Homo sapiens
  peptide 1760
NFPMDEHSCPLEFS

SEQ ID NO: 1805 - protein, 14 aa, Homo sapiens
  peptide 1761
NTTEVVKTTSGDYV

SEQ ID NO: 1806 - protein, 14 aa, Homo sapiens
  peptide 1762
SNRKPSKDKDKKKK

SEQ ID NO: 1807 - protein, 14 aa, Homo sapiens
  peptide 1763
KPSKDKDKKKKNPA

SEQ ID NO: 1808 - protein, 14 aa, Homo sapiens
  peptide 1764
VLYTLRLTIDAECQ

SEQ ID NO: 1809 - protein, 14 aa, Homo sapiens
  peptide 1765
AAAGPNASGAGERG

SEQ ID NO: 1810 - protein, 14 aa, Homo sapiens
  peptide 1766
ADVEPDESSAAAER

SEQ ID NO: 1811 - protein, 14 aa, Homo sapiens
  peptide 1767
ANASGASWGPPRGQ

SEQ ID NO: 1812 - protein, 11 aa, Homo sapiens
  peptide 1768
APPPADVEPDE

SEQ ID NO: 1813 - protein, 11 aa, Homo sapiens
  peptide 1769
GAAYPQCGLND

SEQ ID NO: 1814 - protein, 14 aa, Homo sapiens
  peptide 1770
HCAPPPADVEPDES

SEQ ID NO: 1815 - protein, 11 aa, Homo sapiens
  peptide 1771
IAVLTSRALRA

SEQ ID NO: 1816 - protein, 11 aa, Homo sapiens
  peptide 1772
ILFRRRRRGFR

SEQ ID NO: 1817 - protein, 11 aa, Homo sapiens
  peptide 1773
IVFTVVGNVLV

SEQ ID NO: 1818 - protein, 11 aa, Homo sapiens
  peptide 1774
LIMGLVYARIY

SEQ ID NO: 1819 - protein, 11 aa, Homo sapiens
  peptide 1775
PADVEPDESSA

SEQ ID NO: 1820 - protein, 11 aa, Homo sapiens
  peptide 1776
PCLIMGLVYAR

SEQ ID NO: 1821 - protein, 14 aa, Homo sapiens
  peptide 1777
PDGAAYPQCGLNDE

SEQ ID NO: 1822 - protein, 11 aa, Homo sapiens
  peptide 1778
PFSLANELMAY

SEQ ID NO: 1823 - protein, 11 aa, Homo sapiens
  peptide 1779
PPPADVEPDES

SEQ ID NO: 1824 - protein, 14 aa, Homo sapiens
  peptide 1780
PPPADVEPDESSAA

SEQ ID NO: 1825 - protein, 11 aa, Homo sapiens
  peptide 1781
RRGALRRGGRR

SEQ ID NO: 1826 - protein, 13 aa, Homo sapiens
  peptide 1782
AAAERRRRRGALR

SEQ ID NO: 1827 - protein, 13 aa, Homo sapiens
  peptide 1783
AAERRRRRGALRR

SEQ ID NO: 1828 - protein, 7 aa, Homo sapiens
  peptide 1784
AAGPNAS

SEQ ID NO: 1829 - protein, 7 aa, Homo sapiens
  peptide 1785
AAVVGFL

SEQ ID NO: 1830 - protein, 7 aa, Homo sapiens
  peptide 1786
AERRRRR

SEQ ID NO: 1831 - protein, 13 aa, Homo sapiens
  peptide 1787
AERRRRRGALRRG

SEQ ID NO: 1832 - protein, 7 aa, Homo sapiens
  peptide 1788
AGERGSG

SEQ ID NO: 1833 - protein, 13 aa, Homo sapiens
  peptide 1789
FRRSFKHILFRRR

SEQ ID NO: 1834 - protein, 7 aa, Homo sapiens
  peptide 1790
GFLIVFT

SEQ ID NO: 1835 - protein, 13 aa, Homo sapiens
  peptide 1791
KHILFRRRRRGFR

SEQ ID NO: 1836 - protein, 7 aa, Homo sapiens
  peptide 1792
LFRRRRR

SEQ ID NO: 1837 - protein, 7 aa, Homo sapiens
  peptide 1793
NASGAGE

SEQ ID NO: 1838 - protein, 13 aa, Homo sapiens
  peptide 1794
PFFFSYSLYGICR

SEQ ID NO: 1839 - protein, 13 aa, Homo sapiens
  peptide 1795
RRRGALRRGGRRR

SEQ ID NO: 1840 - protein, 13 aa, Homo sapiens
  peptide 1796
RRRRARSSVCRRK

SEQ ID NO: 1841 - protein, 13 aa, Homo sapiens
  peptide 1797
RRRRGALRRGGRR

SEQ ID NO: 1842 - protein, 13 aa, Homo sapiens
  peptide 1798
RRRRRGALRRGGR

SEQ ID NO: 1843 - protein, 13 aa, Homo sapiens
  peptide 1799
SFKHILFRRRRRG

SEQ ID NO: 1844 - protein, 7 aa, Homo sapiens
  peptide 1800
SRALRAP

SEQ ID NO: 1845 - protein, 13 aa, Homo sapiens
  peptide 1801
SRRRRARSSVCRR

SEQ ID NO: 1846 - protein, 13 aa, Homo sapiens
  peptide 1802
YRVAKLRTRTLSE

SEQ ID NO: 1847 - protein, 14 aa, Homo sapiens
  peptide 1803
AASLENSASSDEED

SEQ ID NO: 1848 - protein, 11 aa, Homo sapiens
  peptide 1804
CYINSTVNPVC

SEQ ID NO: 1849 - protein, 11 aa, Homo sapiens
  peptide 1805
DNLQVPEEELG

SEQ ID NO: 1850 - protein, 14 aa, Homo sapiens
  peptide 1806
FSKLPIQLESAVDT

SEQ ID NO: 1851 - protein, 11 aa, Homo sapiens
  peptide 1807
LACDLWLAIDY

SEQ ID NO: 1852 - protein, 11 aa, Homo sapiens
  peptide 1808
LERKADKLQAQ

SEQ ID NO: 1853 - protein, 14 aa, Homo sapiens
  peptide 1809
LGNLACDLWLAIDY

SEQ ID NO: 1854 - protein, 11 aa, Homo sapiens
  peptide 1810
LPIQLESAVDT

SEQ ID NO: 1855 - protein, 11 aa, Homo sapiens
  peptide 1811
LQVPEEELGMV

SEQ ID NO: 1856 - protein, 11 aa, Homo sapiens
  peptide 1812
PLFPNISSSWI

SEQ ID NO: 1857 - protein, 11 aa, Homo sapiens
  peptide 1813
TAIAAFYMPVT

SEQ ID NO: 1858 - protein, 14 aa, Homo sapiens
  peptide 1814
TFGTAIAAFYMPVT

SEQ ID NO: 1859 - protein, 14 aa, Homo sapiens
  peptide 1815
TTKRAGVMIGLAWV

SEQ ID NO: 1860 - protein, 11 aa, Homo sapiens
  peptide 1816
VDTAKTSDVNS

SEQ ID NO: 1861 - protein, 11 aa, Homo sapiens
  peptide 1817
WLCYINSTVNP

SEQ ID NO: 1862 - protein, 7 aa, Homo sapiens
  peptide 1818
ELAGLQA

SEQ ID NO: 1863 - protein, 7 aa, Homo sapiens
  peptide 1819
IFHKRAP

SEQ ID NO: 1864 - protein, 7 aa, Homo sapiens
  peptide 1820
INSTVNP

SEQ ID NO: 1865 - protein, 7 aa, Homo sapiens
  peptide 1821
NSTVNPV

SEQ ID NO: 1866 - protein, 13 aa, Homo sapiens
  peptide 1822
QQQSMKRSNRRKY

SEQ ID NO: 1867 - protein, 7 aa, Homo sapiens
  peptide 1823
QSMKRSN

SEQ ID NO: 1868 - protein, 13 aa, Homo sapiens
  peptide 1824
RPLTYRAKRTTKR

SEQ ID NO: 1869 - protein, 13 aa, Homo sapiens
  peptide 1825
TKRKRMSLVKEKK

SEQ ID NO: 1870 - protein, 7 aa, Homo sapiens
  peptide 1826
YINSTVN

SEQ ID NO: 1871 - protein, 14 aa, Homo sapiens
  peptide 1827
FKTGNSTATCTTNN

SEQ ID NO: 1872 - protein, 14 aa, Homo sapiens
  peptide 1828
GRELPPDMTVVPGD

SEQ ID NO: 1873 - protein, 14 aa, Homo sapiens
  peptide 1829
AAAAAAVAAATAAV

SEQ ID NO: 1874 - protein, 14 aa, Homo sapiens
  peptide 1830
ATAAVEGSGGSGGG

SEQ ID NO: 1875 - protein, 14 aa, Homo sapiens
  peptide 1831
CTSHDPQSSRGSRR

SEQ ID NO: 1876 - protein, 14 aa, Homo sapiens
  peptide 1832
EEEEEEEGRFYYSE

SEQ ID NO: 1877 - protein, 14 aa, Homo sapiens
  peptide 1833
EEEEGRFYYSEDDH

SEQ ID NO: 1878 - protein, 14 aa, Homo sapiens
  peptide 1834
FREDEGFVREEEDR

SEQ ID NO: 1879 - protein, 14 aa, Homo sapiens
  peptide 1835
FYYSEDDHGDECSY

SEQ ID NO: 1880 - protein, 14 aa, Homo sapiens
  peptide 1836
GVKESLCAKEEKCQ

SEQ ID NO: 1881 - protein, 14 aa, Homo sapiens
  peptide 1837
KILRELSEEEEDEE

SEQ ID NO: 1882 - protein, 14 aa, Homo sapiens
  peptide 1838
LLKFREDEGFVREE

SEQ ID NO: 1883 - protein, 14 aa, Homo sapiens
  peptide 1839
QLGEEALLKFREDE

SEQ ID NO: 1884 - protein, 14 aa, Homo sapiens
  peptide 1840
SEEKILRELSEEEE

SEQ ID NO: 1885 - protein, 14 aa, Homo sapiens
  peptide 1841
SFPHCSDLMPSGSE

SEQ ID NO: 1886 - protein, 14 aa, Homo sapiens
  peptide 1842
SGHTIFNDPFFIVE

SEQ ID NO: 1887 - protein, 14 aa, Homo sapiens
  peptide 1843
SSTSSSLGDKSEYL

SEQ ID NO: 1888 - protein, 14 aa, Homo sapiens
  peptide 1844
TIFNDPFFIVETVC

SEQ ID NO: 1889 - protein, 14 aa, Homo sapiens
  peptide 1845
TQYFDPLRNEYFFD

SEQ ID NO: 1890 - protein, 14 aa, Homo sapiens
  peptide 1846
VSGLRFETQMKTLA

SEQ ID NO: 1891 - protein, 14 aa, Homo sapiens
  peptide 1847
EEDEEEEEEEEEEG

SEQ ID NO: 1892 - protein, 14 aa, Homo sapiens
  peptide 1848
RELSEEEEDEEEEE

SEQ ID NO: 1893 - protein, 14 aa, Homo sapiens
  peptide 1849
SEEEEDEEEEEEEE

SEQ ID NO: 1894 - protein, 14 aa, Homo sapiens
  peptide 1850
RGSRRRRRQRSEKK

SEQ ID NO: 1895 - protein, 14 aa, Homo sapiens
  peptide 1851
RRRRRQRSEKKKAH

SEQ ID NO: 1896 - protein, 14 aa, Homo sapiens
  peptide 1852
ELPRPRRPPPEDEE

SEQ ID NO: 1897 - protein, 14 aa, Homo sapiens
  peptide 1853
ENGGAMTVRGGDEA

SEQ ID NO: 1898 - protein, 14 aa, Homo sapiens
  peptide 1854
FDRNRPSFDGILYY

SEQ ID NO: 1899 - protein, 14 aa, Homo sapiens
  peptide 1855
LLPRTLADPFFIVE

SEQ ID NO: 1900 - protein, 14 aa, Homo sapiens
  peptide 1856
LPPLPEELPRPRRP

SEQ ID NO: 1901 - protein, 14 aa, Homo sapiens
  peptide 1857
LSDGPKEPAPKGRG

SEQ ID NO: 1902 - protein, 14 aa, Homo sapiens
  peptide 1858
PLEKCNVKAKSNVD

SEQ ID NO: 1903 - protein, 14 aa, Homo sapiens
  peptide 1859
RETDHEEPAVLKEE

SEQ ID NO: 1904 - protein, 14 aa, Homo sapiens
  peptide 1860
SLDVFADEIRFYQL

SEQ ID NO: 1905 - protein, 14 aa, Homo sapiens
  peptide 1861
TFELLVRFFACPSK

SEQ ID NO: 1906 - protein, 14 aa, Homo sapiens
  peptide 1862
TVGYGDMRPITVGG

SEQ ID NO: 1907 - protein, 14 aa, Homo sapiens
  peptide 1863
EEEEGDPGLGTVED

SEQ ID NO: 1908 - protein, 14 aa, Homo sapiens
  peptide 1864
PEDEEEEGDPGLGT

SEQ ID NO: 1909 - protein, 14 aa, Homo sapiens
  peptide 1865
VNVSLDVFADEIRF

SEQ ID NO: 1910 - protein, 14 aa, Homo sapiens
  peptide 1866
AKDGISVKGANNSN

SEQ ID NO: 1911 - protein, 14 aa, Homo sapiens
  peptide 1867
ANNSNTTNPPPAPS

SEQ ID NO: 1912 - protein, 14 aa, Homo sapiens
  peptide 1868
CLLFVFSALLEYAA

SEQ ID NO: 1913 - protein, 14 aa, Homo sapiens
  peptide 1869
GISVKGANNSNTTN

SEQ ID NO: 1914 - protein, 14 aa, Homo sapiens
  peptide 1870
VKGANNSNTTNPPP

SEQ ID NO: 1915 - protein, 14 aa, Homo sapiens
  peptide 1871
DFSMRPGFGGPAIP

SEQ ID NO: 1916 - protein, 14 aa, Homo sapiens
  peptide 1872
DSLKTDERISLSQF

SEQ ID NO: 1917 - protein, 14 aa, Homo sapiens
  peptide 1873
GFGGPAIPVGVDVQ

SEQ ID NO: 1918 - protein, 14 aa, Homo sapiens
  peptide 1874
GKVLYSLRVTVTAM

SEQ ID NO: 1919 - protein, 14 aa, Homo sapiens
  peptide 1875
MRPGFGGPAIPVGV

SEQ ID NO: 1920 - protein, 14 aa, Homo sapiens
  peptide 1876
QPDGKVLYSLRVTV

SEQ ID NO: 1921 - protein, 14 aa, Homo sapiens
  peptide 1877
TLYLRHYWKDERLS

SEQ ID NO: 1922 - protein, 14 aa, Homo sapiens
  peptide 1878
VQVESLDSISEVDM

SEQ ID NO: 1923 - protein, 14 aa, Homo sapiens
  peptide 1879
WVPDMFFVHSKRSF

SEQ ID NO: 1924 - protein, 14 aa, Homo sapiens
  peptide 1880
CSLEIESYAYTEDD

SEQ ID NO: 1925 - protein, 14 aa, Homo sapiens
  peptide 1881
ERLSFPSTNNLSMT

SEQ ID NO: 1926 - protein, 14 aa, Homo sapiens
  peptide 1882
SLEEKQSCLKFKAN

SEQ ID NO: 1927 - protein, 14 aa, Homo sapiens
  peptide 1883
AADAFDIGSFDEED

SEQ ID NO: 1928 - protein, 11 aa, Homo sapiens
  peptide 1884
AFDIGSFDEED

SEQ ID NO: 1929 - protein, 11 aa, Homo sapiens
  peptide 1885
DLFQPYIEEIC

SEQ ID NO: 1930 - protein, 11 aa, Homo sapiens
  peptide 1886
DRLEARKKAKN

SEQ ID NO: 1931 - protein, 14 aa, Homo sapiens
  peptide 1887
EEARPLVEFYEEIK

SEQ ID NO: 1932 - protein, 14 aa, Homo sapiens
  peptide 1888
EEERVARSREIFDS

SEQ ID NO: 1933 - protein, 11 aa, Homo sapiens
  peptide 1889
FQKFIESDKFT

SEQ ID NO: 1934 - protein, 11 aa, Homo sapiens
  peptide 1890
GEGEAPQSLLT

SEQ ID NO: 1935 - protein, 11 aa, Homo sapiens
  peptide 1891
HKTKDKHEIDR

SEQ ID NO: 1936 - protein, 11 aa, Homo sapiens
  peptide 1892
LLTMEEIQSVE

SEQ ID NO: 1937 - protein, 14 aa, Homo sapiens
  peptide 1893
LPDSFSPELRSLLE

SEQ ID NO: 1938 - protein, 11 aa, Homo sapiens
  peptide 1894
NHLEEARPLVE

SEQ ID NO: 1939 - protein, 14 aa, Homo sapiens
  peptide 1895
QNLRGDVFQKFIES

SEQ ID NO: 1940 - protein, 14 aa, Homo sapiens
  peptide 1896
QQEVAETVFDTINA

SEQ ID NO: 1941 - protein, 11 aa, Homo sapiens
  peptide 1897
RPLVEFYEEIK

SEQ ID NO: 1942 - protein, 11 aa, Homo sapiens
  peptide 1898
SFSPELRSLLE

SEQ ID NO: 1943 - protein, 11 aa, Homo sapiens
  peptide 1899
SVEETQIKERK

SEQ ID NO: 1944 - protein, 11 aa, Homo sapiens
  peptide 1900
TMEEIQSVEET

SEQ ID NO: 1945 - protein, 14 aa, Homo sapiens
  peptide 1901
WRGEGEAPQSLLTM

SEQ ID NO: 1946 - protein, 11 aa, Homo sapiens
  peptide 1902
YLEDRGEVTFE

SEQ ID NO: 1947 - protein, 7 aa, Homo sapiens
  peptide 1903
AAEIILG

SEQ ID NO: 1948 - protein, 7 aa, Homo sapiens
  peptide 1904
APQSLLT

SEQ ID NO: 1949 - protein, 13 aa, Homo sapiens
  peptide 1905
EEERVARSREIFD

SEQ ID NO: 1950 - protein, 7 aa, Homo sapiens
  peptide 1906
EIQSVEE

SEQ ID NO: 1951 - protein, 13 aa, Homo sapiens
  peptide 1907
ERVARSREIFDSY

SEQ ID NO: 1952 - protein, 7 aa, Homo sapiens
  peptide 1908
GRGGFGE

SEQ ID NO: 1953 - protein, 7 aa, Homo sapiens
  peptide 1909
GYMAPEV

SEQ ID NO: 1954 - protein, 7 aa, Homo sapiens
  peptide 1910
HPFSKSA

SEQ ID NO: 1955 - protein, 7 aa, Homo sapiens
  peptide 1911
IGRGGFG

SEQ ID NO: 1956 - protein, 7 aa, Homo sapiens
  peptide 1912
IPPRGEV

SEQ ID NO: 1957 - protein, 13 aa, Homo sapiens
  peptide 1913
IQSVEETQIKERK

SEQ ID NO: 1958 - protein, 13 aa, Homo sapiens
  peptide 1914
ISERWQQEVAETV

SEQ ID NO: 1959 - protein, 13 aa, Homo sapiens
  peptide 1915
KYPPPLIPPRGEV

SEQ ID NO: 1960 - protein, 7 aa, Homo sapiens
  peptide 1916
LEDRGEV

SEQ ID NO: 1961 - protein, 7 aa, Homo sapiens
  peptide 1917
LTMNDFS

SEQ ID NO: 1962 - protein, 7 aa, Homo sapiens
  peptide 1918
PQSLLTM

SEQ ID NO: 1963 - protein, 13 aa, Homo sapiens
  peptide 1919
QSVEETQIKERKC

SEQ ID NO: 1964 - protein, 7 aa, Homo sapiens
  peptide 1920
RGGFGEV

SEQ ID NO: 1965 - protein, 13 aa, Homo sapiens
  peptide 1921
RVARSREIFDSYI

SEQ ID NO: 1966 - protein, 13 aa, Homo sapiens
  peptide 1922
SVMQKYLEDRGEV

SEQ ID NO: 1967 - protein, 11 aa, Homo sapiens
  peptide 1923
ALTALPDPDPE

SEQ ID NO: 1968 - protein, 14 aa, Homo sapiens
  peptide 1924
APSSGDAPPGAPLA

SEQ ID NO: 1969 - protein, 11 aa, Homo sapiens
  peptide 1925
CQCRRRRRRRP

SEQ ID NO: 1970 - protein, 11 aa, Homo sapiens
  peptide 1926
CRRRRRRRPLW

SEQ ID NO: 1971 - protein, 14 aa, Homo sapiens
  peptide 1927
DPEPPGTPEMQAPV

SEQ ID NO: 1972 - protein, 11 aa, Homo sapiens
  peptide 1928
ERGKASEVVLR

SEQ ID NO: 1973 - protein, 11 aa, Homo sapiens
  peptide 1929
FRDLLSVSFEG

SEQ ID NO: 1974 - protein, 11 aa, Homo sapiens
  peptide 1930
LRCQCRRRRRR

SEQ ID NO: 1975 - protein, 14 aa, Homo sapiens
  peptide 1931
LRCQCRRRRRRRPL

SEQ ID NO: 1976 - protein, 14 aa, Homo sapiens
  peptide 1932
MQAPVASRRKPPSA

SEQ ID NO: 1977 - protein, 14 aa, Homo sapiens
  peptide 1933
PLLGWKEPVPPDER

SEQ ID NO: 1978 - protein, 11 aa, Homo sapiens
  peptide 1934
QCRRRRRRRPL

SEQ ID NO: 1979 - protein, 14 aa, Homo sapiens
  peptide 1935
QDCAPSSGDAPPGA

SEQ ID NO: 1980 - protein, 11 aa, Homo sapiens
  peptide 1936
RCQCRRRRRRR

SEQ ID NO: 1981 - protein, 14 aa, Homo sapiens
  peptide 1937
WRASTSGLRQDCAP

SEQ ID NO: 1982 - protein, 13 aa, Homo sapiens
  peptide 1938
CQCRRRRRRRPLW

SEQ ID NO: 1983 - protein, 7 aa, Homo sapiens
  peptide 1939
CRRRRRR

SEQ ID NO: 1984 - protein, 13 aa, Homo sapiens
  peptide 1940
EVAEGATCQAYEL

SEQ ID NO: 1985 - protein, 13 aa, Homo sapiens
  peptide 1941
FLRLLRCQCRRRR

SEQ ID NO: 1986 - protein, 13 aa, Homo sapiens
  peptide 1942
FSREKKAAKTLAI

SEQ ID NO: 1987 - protein, 13 aa, Homo sapiens
  peptide 1943
GATCQAYELADYS

SEQ ID NO: 1988 - protein, 13 aa, Homo sapiens
  peptide 1944
LCCTASILSLCTI

SEQ ID NO: 1989 - protein, 7 aa, Homo sapiens
  peptide 1945
PEMQAPV

SEQ ID NO: 1990 - protein, 13 aa, Homo sapiens
  peptide 1946
RRRRRRPLWRVYG

SEQ ID NO: 1991 - protein, 7 aa, Homo sapiens
  peptide 1947
RRRRRRR

SEQ ID NO: 1992 - protein, 13 aa, Homo sapiens
  peptide 1948
RRRRRRRPLWRVY

SEQ ID NO: 1993 - protein, 7 aa, Homo sapiens
  peptide 1949
SATMEVL

SEQ ID NO: 1994 - protein, 7 aa, Homo sapiens
  peptide 1950
VIFWLGY

SEQ ID NO: 1995 - protein, 13 aa, Homo sapiens
  peptide 1951
VLCWFPFFFVLPL

SEQ ID NO: 1996 - protein, 14 aa, Homo sapiens
  peptide 1952
VVCCAQSVNDPGNM

SEQ ID NO: 1997 - protein, 14 aa, Homo sapiens
  peptide 1953
LYWKNGDESLKTDE

SEQ ID NO: 1998 - protein, 14 aa, Homo sapiens
  peptide 1954
QTCSLELESYAYTD

SEQ ID NO: 1999 - protein, 11 aa, Homo sapiens
  peptide 1955
CTIDVTFFPFD

SEQ ID NO: 2000 - protein, 11 aa, Homo sapiens
  peptide 1956
DQDVDKRDFFD

SEQ ID NO: 2001 - protein, 11 aa, Homo sapiens
  peptide 1957
GLSFLTVLVFY

SEQ ID NO: 2002 - protein, 14 aa, Homo sapiens
  peptide 1958
HEDSLLKDLFQDYE

SEQ ID NO: 2003 - protein, 14 aa, Homo sapiens
  peptide 1959
PSDSVWTPDIVLFD

SEQ ID NO: 2004 - protein, 14 aa, Homo sapiens
  peptide 1960
QDVDKRDFFDNGEW

SEQ ID NO: 2005 - protein, 11 aa, Homo sapiens
  peptide 1961
QKEETESGSGP

SEQ ID NO: 2006 - protein, 11 aa, Homo sapiens
  peptide 1962
RDFFDNGEWEI

SEQ ID NO: 2007 - protein, 14 aa, Homo sapiens
  peptide 1963
SVWTPDIVLFDNAD

SEQ ID NO: 2008 - protein, 14 aa, Homo sapiens
  peptide 1964
SWTYDGSQVDIILE

SEQ ID NO: 2009 - protein, 14 aa, Homo sapiens
  peptide 1965
TKTVIRYNGTVTWT

SEQ ID NO: 2010 - protein, 13 aa, Homo sapiens
  peptide 1966
AISQLVDVDEKNQ

SEQ ID NO: 2011 - protein, 7 aa, Homo sapiens
  peptide 1967
RYNGTVT

SEQ ID NO: 2012 - protein, 13 aa, Homo sapiens
  peptide 1968
TYSFVIKRLPLFY

SEQ ID NO: 2013 - protein, 13 aa, Homo sapiens
  peptide 1969
VTYSFVIKRLPLF

SEQ ID NO: 2014 - protein, 11 aa, Homo sapiens
  peptide 1970
DFIIKRKPLFY

SEQ ID NO: 2015 - protein, 14 aa, Homo sapiens
  peptide 1971
MRRAPSLVLFFLVA

SEQ ID NO: 2016 - protein, 11 aa, Homo sapiens
  peptide 1972
NEREQIMTTNV

SEQ ID NO: 2017 - protein, 11 aa, Homo sapiens
  peptide 1973
SLAQLISVNER

SEQ ID NO: 2018 - protein, 11 aa, Homo sapiens
  peptide 1974
TSPSNFYGNSM

SEQ ID NO: 2019 - protein, 11 aa, Homo sapiens
  peptide 1975
VFMFVCVLGTV

SEQ ID NO: 2020 - protein, 13 aa, Homo sapiens
  peptide 1976
DFIIKRKPLFYTI

SEQ ID NO: 2021 - protein, 13 aa, Homo sapiens
  peptide 1977
ISVNEREQIMTTN

SEQ ID NO: 2022 - protein, 13 aa, Homo sapiens
  peptide 1978
LISVNEREQIMTT

SEQ ID NO: 2023 - protein, 14 aa, Homo sapiens
  peptide 1979
ECPMQLEDFPMDAH

SEQ ID NO: 2024 - protein, 14 aa, Homo sapiens
  peptide 1980
GMFSGFIMIKNLLL

SEQ ID NO: 2025 - protein, 14 aa, Homo sapiens
  peptide 1981
ISAECPMQLEDFPM

SEQ ID NO: 2026 - protein, 14 aa, Homo sapiens
  peptide 1982
KKREVILNKSTNAF

SEQ ID NO: 2027 - protein, 14 aa, Homo sapiens
  peptide 1983
MNLSSHFGFSQMPT

SEQ ID NO: 2028 - protein, 14 aa, Homo sapiens
  peptide 1984
SGFIMIKNLLLFCI

SEQ ID NO: 2029 - protein, 14 aa, Homo sapiens
  peptide 1985
DGKKALEAAKIKKK

SEQ ID NO: 2030 - protein, 14 aa, Homo sapiens
  peptide 1986
EVILNKSTNAFTTG

SEQ ID NO: 2031 - protein, 14 aa, Homo sapiens
  peptide 1987
ASEAEHRLFERLFE

SEQ ID NO: 2032 - protein, 11 aa, Homo sapiens
  peptide 1988
DIKYNCCEEIY

SEQ ID NO: 2033 - protein, 14 aa, Homo sapiens
  peptide 1989
ERLFEDYNEIIRPV

SEQ ID NO: 2034 - protein, 14 aa, Homo sapiens
  peptide 1990
HHRRIKISNFSANL

SEQ ID NO: 2035 - protein, 11 aa, Homo sapiens
  peptide 1991
HRLFERLFEDY

SEQ ID NO: 2036 - protein, 11 aa, Homo sapiens
  peptide 1992
IRPVANVSDPV

SEQ ID NO: 2037 - protein, 11 aa, Homo sapiens
  peptide 1993
KIDVTYFPFDY

SEQ ID NO: 2038 - protein, 11 aa, Homo sapiens
  peptide 1994
MSQLVKVDEVN

SEQ ID NO: 2039 - protein, 14 aa, Homo sapiens
  peptide 1995
PVANVSDPVIIHFE

SEQ ID NO: 2040 - protein, 14 aa, Homo sapiens
  peptide 1996
RLFERLFEDYNEII

SEQ ID NO: 2041 - protein, 14 aa, Homo sapiens
  peptide 1997
VARASEAEHRLFER

SEQ ID NO: 2042 - protein, 11 aa, Homo sapiens
  peptide 1998
VDEVNQIMETN

SEQ ID NO: 2043 - protein, 14 aa, Homo sapiens
  peptide 1999
VDEVNQIMETNLWL

SEQ ID NO: 2044 - protein, 13 aa, Homo sapiens
  peptide 2000
CCEEIYPDITYSL

SEQ ID NO: 2045 - protein, 13 aa, Homo sapiens
  peptide 2001
CEEIYPDITYSLY

SEQ ID NO: 2046 - protein, 13 aa, Homo sapiens
  peptide 2002
DKTKALLKYTGEV

SEQ ID NO: 2047 - protein, 7 aa, Homo sapiens
  peptide 2003
ENMKAQN

SEQ ID NO: 2048 - protein, 13 aa, Homo sapiens
  peptide 2004
EVSMSQLVKVDEV

SEQ ID NO: 2049 - protein, 13 aa, Homo sapiens
  peptide 2005
IAENMKAQNEAKE

SEQ ID NO: 2050 - protein, 13 aa, Homo sapiens
  peptide 2006
LFERLFEDYNEII

SEQ ID NO: 2051 - protein, 7 aa, Homo sapiens
  peptide 2007
LKYTGEV

SEQ ID NO: 2052 - protein, 13 aa, Homo sapiens
  peptide 2008
RLFEDYNEIIRPV

SEQ ID NO: 2053 - protein, 13 aa, Homo sapiens
  peptide 2009
YSLYIRRLPLFYT

SEQ ID NO: 2054 - protein, 14 aa, Homo sapiens
  peptide 2010
AECPMHLEDFPMDV

SEQ ID NO: 2055 - protein, 14 aa, Homo sapiens
  peptide 2011
DSPTETKTYNSVSK

SEQ ID NO: 2056 - protein, 14 aa, Homo sapiens
  peptide 2012
IFTRILDRLLDGYD

SEQ ID NO: 2057 - protein, 14 aa, Homo sapiens
  peptide 2013
LYTMRLTIHAECPM

SEQ ID NO: 2058 - protein, 14 aa, Homo sapiens
  peptide 2014
PMHLEDFPMDVHAC

SEQ ID NO: 2059 - protein, 14 aa, Homo sapiens
  peptide 2015
TETKTYNSVSKVDK

SEQ ID NO: 2060 - protein, 14 aa, Homo sapiens
  peptide 2016
VVGTEIIRSSTGEY

SEQ ID NO: 2061 - protein, 14 aa, Homo sapiens
  peptide 2017
GQGESRRQEPGDFV

SEQ ID NO: 2062 - protein, 14 aa, Homo sapiens
  peptide 2018
SPTETKTYNSVSKV

SEQ ID NO: 2063 - protein, 11 aa, Homo sapiens
  peptide 2019
GLCIISIDRYI

SEQ ID NO: 2064 - protein, 11 aa, Homo sapiens
  peptide 2020
IDRYIGVSYPL

SEQ ID NO: 2065 - protein, 14 aa, Homo sapiens
  peptide 2021
IGPLFGWRQPAPED

SEQ ID NO: 2066 - protein, 14 aa, Homo sapiens
  peptide 2022
LKTDKSDSEQVTLR

SEQ ID NO: 2067 - protein, 14 aa, Homo sapiens
  peptide 2023
LTSTVLPFSAIFEV

SEQ ID NO: 2068 - protein, 14 aa, Homo sapiens
  peptide 2024
VLCWLPFFLVMPIG

SEQ ID NO: 2069 - protein, 13 aa, Homo sapiens
  peptide 2025
ITVSKDQSSCTTA

SEQ ID NO: 2070 - protein, 7 aa, Homo sapiens
  peptide 2026
PSETVFK

SEQ ID NO: 2071 - protein, 14 aa, Homo sapiens
  peptide 2027
ANGQPGFKSNMPLA

SEQ ID NO: 2072 - protein, 14 aa, Homo sapiens
  peptide 2028
ASILSLCAISIDRY

SEQ ID NO: 2073 - protein, 11 aa, Homo sapiens
  peptide 2029
CQCRGRGRRRR

SEQ ID NO: 2074 - protein, 11 aa, Homo sapiens
  peptide 2030
CRGRGRRRRRR

SEQ ID NO: 2075 - protein, 11 aa, Homo sapiens
  peptide 2031
DKECGVTEEPF

SEQ ID NO: 2076 - protein, 14 aa, Homo sapiens
  peptide 2032
GCQCRGRGRRRRRR

SEQ ID NO: 2077 - protein, 11 aa, Homo sapiens
  peptide 2033
GRGRRRRRRRR

SEQ ID NO: 2078 - protein, 14 aa, Homo sapiens
  peptide 2034
GRGRRRRRRRRRLG

SEQ ID NO: 2079 - protein, 11 aa, Homo sapiens
  peptide 2035
GRRRRRRRRRL

SEQ ID NO: 2080 - protein, 14 aa, Homo sapiens
  peptide 2036
LCWLPFFIALPLGS

SEQ ID NO: 2081 - protein, 11 aa, Homo sapiens
  peptide 2037
LSLCAISIDRY

SEQ ID NO: 2082 - protein, 14 aa, Homo sapiens
  peptide 2038
PCSSKEFKRAFVRI

SEQ ID NO: 2083 - protein, 11 aa, Homo sapiens
  peptide 2039
QCRGRGRRRRR

SEQ ID NO: 2084 - protein, 11 aa, Homo sapiens
  peptide 2040
RGRRRRRRRRR

SEQ ID NO: 2085 - protein, 14 aa, Homo sapiens
  peptide 2041
RILGCQCRGRGRRR

SEQ ID NO: 2086 - protein, 11 aa, Homo sapiens
  peptide 2042
RRRRRRRRRLG

SEQ ID NO: 2087 - protein, 11 aa, Homo sapiens
  peptide 2043
SIDRYIGVRYS

SEQ ID NO: 2088 - protein, 13 aa, Homo sapiens
  peptide 2044
ANFTGPNQTSSNS

SEQ ID NO: 2089 - protein, 13 aa, Homo sapiens
  peptide 2045
FTGPNQTSSNSTL

SEQ ID NO: 2090 - protein, 7 aa, Homo sapiens
  peptide 2046
GRRRRRR

SEQ ID NO: 2091 - protein, 13 aa, Homo sapiens
  peptide 2047
LGCQCRGRGRRRR

SEQ ID NO: 2092 - protein, 13 aa, Homo sapiens
  peptide 2048
NFTGPNQTSSNST

SEQ ID NO: 2093 - protein, 7 aa, Homo sapiens
  peptide 2049
QTSSNST

SEQ ID NO: 2094 - protein, 13 aa, Homo sapiens
  peptide 2050
RRRRRRLGGCAYT

SEQ ID NO: 2095 - protein, 13 aa, Homo sapiens
  peptide 2051
SFTVLPFSAALEV

SEQ ID NO: 2096 - protein, 13 aa, Homo sapiens
  peptide 2052
TGPNQTSSNSTLP

SEQ ID NO: 2097 - protein, 14 aa, Homo sapiens
  peptide 2053
CVPTPDSGVVCGRM

SEQ ID NO: 2098 - protein, 11 aa, Homo sapiens
  peptide 2054
DHYLQWNVSEY

SEQ ID NO: 2099 - protein, 11 aa, Homo sapiens
  peptide 2055
DISGYIPNGEW

SEQ ID NO: 2100 - protein, 11 aa, Homo sapiens
  peptide 2056
EGDPDLAKILE

SEQ ID NO: 2101 - protein, 11 aa, Homo sapiens
  peptide 2057
ELVKNYNPLER

SEQ ID NO: 2102 - protein, 14 aa, Homo sapiens
  peptide 2058
EVRYIANRFRCQDE

SEQ ID NO: 2103 - protein, 14 aa, Homo sapiens
  peptide 2059
FSLSLLQIMDVDEK

SEQ ID NO: 2104 - protein, 14 aa, Homo sapiens
  peptide 2060
GEDKVRPACQHKQR

SEQ ID NO: 2105 - protein, 11 aa, Homo sapiens
  peptide 2061
GIFKSSCYIDV

SEQ ID NO: 2106 - protein, 11 aa, Homo sapiens
  peptide 2062
HGGQPPEGDPD

SEQ ID NO: 2107 - protein, 11 aa, Homo sapiens
  peptide 2063
LERPVANDSQP

SEQ ID NO: 2108 - protein, 14 aa, Homo sapiens
  peptide 2064
LHGGQPPEGDPDLA

SEQ ID NO: 2109 - protein, 11 aa, Homo sapiens
  peptide 2065
LQMQEADISGY

SEQ ID NO: 2110 - protein, 11 aa, Homo sapiens
  peptide 2066
MLLVAEIMPAT

SEQ ID NO: 2111 - protein, 11 aa, Homo sapiens
  peptide 2067
MSAPNFVEAVS

SEQ ID NO: 2112 - protein, 14 aa, Homo sapiens
  peptide 2068
PACQHKQRRCSLAS

SEQ ID NO: 2113 - protein, 11 aa, Homo sapiens
  peptide 2069
SGYIPNGEWDL

SEQ ID NO: 2114 - protein, 11 aa, Homo sapiens
  peptide 2070
SLSLLQIMDVD

SEQ ID NO: 2115 - protein, 14 aa, Homo sapiens
  peptide 2071
SVPLIAQYFASTMI

SEQ ID NO: 2116 - protein, 14 aa, Homo sapiens
  peptide 2072
TVYFSLSLLQIMDV

SEQ ID NO: 2117 - protein, 11 aa, Homo sapiens
  peptide 2073
VKNYNPLERPV

SEQ ID NO: 2118 - protein, 14 aa, Homo sapiens
  peptide 2074
VTVIVLQYHHHDPD

SEQ ID NO: 2119 - protein, 11 aa, Homo sapiens
  peptide 2075
YIANRFRCQDE

SEQ ID NO: 2120 - protein, 14 aa, Homo sapiens
  peptide 2076
YNPLERPVANDSQP

SEQ ID NO: 2121 - protein, 13 aa, Homo sapiens
  peptide 2077
DEKNQVLTTNIWL

SEQ ID NO: 2122 - protein, 7 aa, Homo sapiens
  peptide 2078
DILLYNS

SEQ ID NO: 2123 - protein, 7 aa, Homo sapiens
  peptide 2079
EKISLGI

SEQ ID NO: 2124 - protein, 13 aa, Homo sapiens
  peptide 2080
ERFYECCKEPYPD

SEQ ID NO: 2125 - protein, 7 aa, Homo sapiens
  peptide 2081
IPGKRSE

SEQ ID NO: 2126 - protein, 7 aa, Homo sapiens
  peptide 2082
KISLGIT

SEQ ID NO: 2127 - protein, 7 aa, Homo sapiens
  peptide 2083
KNYNPLE

SEQ ID NO: 2128 - protein, 7 aa, Homo sapiens
  peptide 2084
VKTVRFP

SEQ ID NO: 2129 - protein, 13 aa, Homo sapiens
  peptide 2085
YFSLSLLQIMDVD

SEQ ID NO: 2130 - protein, 14 aa, Homo sapiens
  peptide 2086
PEPAAPQQPTAEEE

SEQ ID NO: 2131 - protein, 14 aa, Homo sapiens
  peptide 2087
YGNCYTFNDKNNSN

SEQ ID NO: 2132 - protein, 14 aa, Homo sapiens
  peptide 2088
ACDQLALGVAALFG

SEQ ID NO: 2133 - protein, 14 aa, Homo sapiens
  peptide 2089
ACLGVSCVLFVIAR

SEQ ID NO: 2134 - protein, 14 aa, Homo sapiens
  peptide 2090
AEILKQILFMGMMT

SEQ ID NO: 2135 - protein, 14 aa, Homo sapiens
  peptide 2091
ALSTRIVGGIWWFF

SEQ ID NO: 2136 - protein, 14 aa, Homo sapiens
  peptide 2092
FEASRRACDQLALG

SEQ ID NO: 2137 - protein, 14 aa, Homo sapiens
  peptide 2093
FGPSHSSSVSAVQS

SEQ ID NO: 2138 - protein, 14 aa, Homo sapiens
  peptide 2094
GYCLDLLKELSNIL

SEQ ID NO: 2139 - protein, 14 aa, Homo sapiens
  peptide 2095
IDNPHVSSIIEKWS

SEQ ID NO: 2140 - protein, 14 aa, Homo sapiens
  peptide 2096
IFETVENEPVNVEE

SEQ ID NO: 2141 - protein, 14 aa, Homo sapiens
  peptide 2097
LKEMKKGKEFYVIF

SEQ ID NO: 2142 - protein, 14 aa, Homo sapiens
  peptide 2098
LLMESTSIEYVTQR

SEQ ID NO: 2143 - protein, 14 aa, Homo sapiens
  peptide 2099
LLNIDNPHVSSIIE

SEQ ID NO: 2144 - protein, 14 aa, Homo sapiens
  peptide 2100
LNSFWFGVGALMQQ

SEQ ID NO: 2145 - protein, 14 aa, Homo sapiens
  peptide 2101
PLYGNDRFEGYCLD

SEQ ID NO: 2146 - protein, 14 aa, Homo sapiens
  peptide 2102
QLALGVAALFGPSH

SEQ ID NO: 2147 - protein, 14 aa, Homo sapiens
  peptide 2103
SDKPLYGNDRFEGY

SEQ ID NO: 2148 - protein, 14 aa, Homo sapiens
  peptide 2104
SLQCHRHKPWRLGP

SEQ ID NO: 2149 - protein, 14 aa, Homo sapiens
  peptide 2105
TVENEPVNVEELAF

SEQ ID NO: 2150 - protein, 14 aa, Homo sapiens
  peptide 2106
GIFETVENEPVNVE

SEQ ID NO: 2151 - protein, 14 aa, Homo sapiens
  peptide 2107
NIKIKIRQLPSGNK

SEQ ID NO: 2152 - protein, 14 aa, Homo sapiens
  peptide 2108
RLLNIDNPHVSSII

SEQ ID NO: 2153 - protein, 14 aa, Homo sapiens
  peptide 2109
ARPRSPSPISTLSH

SEQ ID NO: 2154 - protein, 14 aa, Homo sapiens
  peptide 2110
CKENEYVFDEYTCK

SEQ ID NO: 2155 - protein, 14 aa, Homo sapiens
  peptide 2111
CMFVPKVYIILAKP

SEQ ID NO: 2156 - protein, 14 aa, Homo sapiens
  peptide 2112
CWTCTPCKENEYVF

SEQ ID NO: 2157 - protein, 14 aa, Homo sapiens
  peptide 2113
EFIRDSLISSEEEE

SEQ ID NO: 2158 - protein, 14 aa, Homo sapiens
  peptide 2114
ESRGLGAGAGAGGS

SEQ ID NO: 2159 - protein, 14 aa, Homo sapiens
  peptide 2115
FSVSLSATVALGCM

SEQ ID NO: 2160 - protein, 14 aa, Homo sapiens
  peptide 2116
GLGAGAGAGGSAGG

SEQ ID NO: 2161 - protein, 14 aa, Homo sapiens
  peptide 2117
IKLQSPDVKWFDDY

SEQ ID NO: 2162 - protein, 14 aa, Homo sapiens
  peptide 2118
IMNFKEMGKDYFDY

SEQ ID NO: 2163 - protein, 14 aa, Homo sapiens
  peptide 2119
QARAMVDIVKRYNW

SEQ ID NO: 2164 - protein, 14 aa, Homo sapiens
  peptide 2120
RPETNHRNPWFQEF

SEQ ID NO: 2165 - protein, 14 aa, Homo sapiens
  peptide 2121
PCKENEYVFDEYTC

SEQ ID NO: 2166 - protein, 14 aa, Homo sapiens
  peptide 2122
PQENSKYNKTCNSS

SEQ ID NO: 2167 - protein, 14 aa, Homo sapiens
  peptide 2123
RILAGSKKKICTKK

SEQ ID NO: 2168 - protein, 14 aa, Homo sapiens
  peptide 2124
RTDDDVPSLHSEPV

SEQ ID NO: 2169 - protein, 14 aa, Homo sapiens
  peptide 2125
WPTDDLTGCDLIPV

SEQ ID NO: 2170 - protein, 14 aa, Homo sapiens
  peptide 2126
AAEKNWQVTAVNIL

SEQ ID NO: 2171 - protein, 14 aa, Homo sapiens
  peptide 2127
APLTITLVREEVID

SEQ ID NO: 2172 - protein, 14 aa, Homo sapiens
  peptide 2128
FEEGRDQTTSDQSN

SEQ ID NO: 2173 - protein, 14 aa, Homo sapiens
  peptide 2129
GAFMQQGCDISPRS

SEQ ID NO: 2174 - protein, 14 aa, Homo sapiens
  peptide 2130
KGKYAYLLESTMNE

SEQ ID NO: 2175 - protein, 14 aa, Homo sapiens
  peptide 2131
KHDGIRKIGYWNED

SEQ ID NO: 2176 - protein, 14 aa, Homo sapiens
  peptide 2132
KIGYWNEDDKFVPA

SEQ ID NO: 2177 - protein, 14 aa, Homo sapiens
  peptide 2133
KKNANQFEGNDRYE

SEQ ID NO: 2178 - protein, 14 aa, Homo sapiens
  peptide 2134
KYAYLLESTMNEYI

SEQ ID NO: 2179 - protein, 14 aa, Homo sapiens
  peptide 2135
LNKFKESGANVTGF

SEQ ID NO: 2180 - protein, 14 aa, Homo sapiens
  peptide 2136
PLTITLVREEVIDF

SEQ ID NO: 2181 - protein, 14 aa, Homo sapiens
  peptide 2137
SAEPSVFVRTTEEG

SEQ ID NO: 2182 - protein, 14 aa, Homo sapiens
  peptide 2138
SKGKYAYLLESTMN

SEQ ID NO: 2183 - protein, 14 aa, Homo sapiens
  peptide 2139
SRFSPYEWHSEEFE

SEQ ID NO: 2184 - protein, 14 aa, Homo sapiens
  peptide 2140
VRKSKGKYAYLLES

SEQ ID NO: 2185 - protein, 14 aa, Homo sapiens
  peptide 2141
YAYLLESTMNEYIE

SEQ ID NO: 2186 - protein, 14 aa, Homo sapiens
  peptide 2142
YWNEDDKFVPAATD

SEQ ID NO: 2187 - protein, 14 aa, Homo sapiens
  peptide 2143
EHAAFRFALSQLTE

SEQ ID NO: 2188 - protein, 14 aa, Homo sapiens
  peptide 2144
VIDFSKPFMSLGIS

SEQ ID NO: 2189 - protein, 14 aa, Homo sapiens
  peptide 2145
AIFGFYDKKSVNTI

SEQ ID NO: 2190 - protein, 14 aa, Homo sapiens
  peptide 2146
IESAEDLSKQTEIA

SEQ ID NO: 2191 - protein, 14 aa, Homo sapiens
  peptide 2147
INPSSSQNSQNFAT

SEQ ID NO: 2192 - protein, 14 aa, Homo sapiens
  peptide 2148
LKKERRVILDCERD

SEQ ID NO: 2193 - protein, 14 aa, Homo sapiens
  peptide 2149
MLVALIEFCYKSRA

SEQ ID NO: 2194 - protein, 14 aa, Homo sapiens
  peptide 2150
NHEMLEGNERYEGY

SEQ ID NO: 2195 - protein, 14 aa, Homo sapiens
  peptide 2151
NPAVPWGQGVEIER

SEQ ID NO: 2196 - protein, 14 aa, Homo sapiens
  peptide 2152
PIESAEDLSKQTEI

SEQ ID NO: 2197 - protein, 14 aa, Homo sapiens
  peptide 2153
PYEWHTEEFEDGRE

SEQ ID NO: 2198 - protein, 14 aa, Homo sapiens
  peptide 2154
RFSPYEWHTEEFED

SEQ ID NO: 2199 - protein, 14 aa, Homo sapiens
  peptide 2155
ALHTSFVTPSFPTD

SEQ ID NO: 2200 - protein, 14 aa, Homo sapiens
  peptide 2156
ERYEGYCVDLAYEI

SEQ ID NO: 2201 - protein, 14 aa, Homo sapiens
  peptide 2157
FAFLLESTMNEYIE

SEQ ID NO: 2202 - protein, 14 aa, Homo sapiens
  peptide 2158
FVYLYDTERGFSIL

SEQ ID NO: 2203 - protein, 14 aa, Homo sapiens
  peptide 2159
GFSILQAIMEAAVQ

SEQ ID NO: 2204 - protein, 14 aa, Homo sapiens
  peptide 2160
LGLLGHSHGGFPNT

SEQ ID NO: 2205 - protein, 14 aa, Homo sapiens
  peptide 2161
NITGFQIVNNENPM

SEQ ID NO: 2206 - protein, 14 aa, Homo sapiens
  peptide 2162
PFSDQQISNDSASS

SEQ ID NO: 2207 - protein, 14 aa, Homo sapiens
  peptide 2163
RIKYKLSIVGDGKY

SEQ ID NO: 2208 - protein, 14 aa, Homo sapiens
  peptide 2164
RKSKGKFAFLLEST

SEQ ID NO: 2209 - protein, 14 aa, Homo sapiens
  peptide 2165
RQEKRYLIDCEVER

SEQ ID NO: 2210 - protein, 14 aa, Homo sapiens
  peptide 2166
SIVGDGKYGARDPE

SEQ ID NO: 2211 - protein, 14 aa, Homo sapiens
  peptide 2167
SKGKFAFLLESTMN

SEQ ID NO: 2212 - protein, 14 aa, Homo sapiens
  peptide 2168
SRGVYAIFGFYDQM

SEQ ID NO: 2213 - protein, 14 aa, Homo sapiens
  peptide 2169
TQNFKPAPATNTQN

SEQ ID NO: 2214 - protein, 14 aa, Homo sapiens
  peptide 2170
VTPSFPTDADVQFV

SEQ ID NO: 2215 - protein, 14 aa, Homo sapiens
  peptide 2171
YKLSIVGDGKYGAR

SEQ ID NO: 2216 - protein, 14 aa, Homo sapiens
  peptide 2172
KFAFLLESTMNEYI

SEQ ID NO: 2217 - protein, 14 aa, Homo sapiens
  peptide 2173
VRKSKGKFAFLLES

SEQ ID NO: 2218 - protein, 14 aa, Homo sapiens
  peptide 2174
GKFAFLLESTMNEY

SEQ ID NO: 2219 - protein, 14 aa, Homo sapiens
  peptide 2175
DGRKFFFIRAIPQG

SEQ ID NO: 2220 - protein, 14 aa, Homo sapiens
  peptide 2176
ENDLDESQVPDQPS

SEQ ID NO: 2221 - protein, 14 aa, Homo sapiens
  peptide 2177
LDESQVPDQPSSLH

SEQ ID NO: 2222 - protein, 14 aa, Homo sapiens
  peptide 2178
NPLLPPPMSAIEPK

SEQ ID NO: 2223 - protein, 14 aa, Homo sapiens
  peptide 2179
VPDLSTPMLPPVGV

SEQ ID NO: 2224 - protein, 11 aa, Homo sapiens
  peptide 2180
ADHLKAEDTDF

SEQ ID NO: 2225 - protein, 11 aa, Homo sapiens
  peptide 2181
CCAEIYPDITY

SEQ ID NO: 2226 - protein, 11 aa, Homo sapiens
  peptide 2182
DAVGTYNTRKY

SEQ ID NO: 2227 - protein, 11 aa, Homo sapiens
  peptide 2183
EDTDFSVKEDW

SEQ ID NO: 2228 - protein, 11 aa, Homo sapiens
  peptide 2184
FWESGEWVIVD

SEQ ID NO: 2229 - protein, 14 aa, Homo sapiens
  peptide 2185
GTYNTRKYECCAEI

SEQ ID NO: 2230 - protein, 14 aa, Homo sapiens
  peptide 2186
KKLFSGYNKWSRPV

SEQ ID NO: 2231 - protein, 14 aa, Homo sapiens
  peptide 2187
KSPSDQLPPQQPLE

SEQ ID NO: 2232 - protein, 11 aa, Homo sapiens
  peptide 2188
LDFWESGEWVI

SEQ ID NO: 2233 - protein, 11 aa, Homo sapiens
  peptide 2189
LLLMKRPSVVK

SEQ ID NO: 2234 - protein, 11 aa, Homo sapiens
  peptide 2190
LMKRPSVVKDN

SEQ ID NO: 2235 - protein, 11 aa, Homo sapiens
  peptide 2191
NVTSIRIPSEL

SEQ ID NO: 2236 - protein, 11 aa, Homo sapiens
  peptide 2192
RKYECCAEIYP

SEQ ID NO: 2237 - protein, 11 aa, Homo sapiens
  peptide 2193
RSRSIQYCVPR

SEQ ID NO: 2238 - protein, 11 aa, Homo sapiens
  peptide 2194
RWDPADYENVT

SEQ ID NO: 2239 - protein, 14 aa, Homo sapiens
  peptide 2195
SCSIDVTFFPFDQQ

SEQ ID NO: 2240 - protein, 14 aa, Homo sapiens
  peptide 2196
TGLLRASSHVETRA

SEQ ID NO: 2241 - protein, 11 aa, Homo sapiens
  peptide 2197
VGLFLPPWLAG

SEQ ID NO: 2242 - protein, 11 aa, Homo sapiens
  peptide 2198
YECCAEIYPDI

SEQ ID NO: 2243 - protein, 14 aa, Homo sapiens
  peptide 2199
YNKWSRPVANISDV

SEQ ID NO: 2244 - protein, 13 aa, Homo sapiens
  peptide 2200
ADGQAAGALASRN

SEQ ID NO: 2245 - protein, 7 aa, Homo sapiens
  peptide 2201
LPPPDQP

SEQ ID NO: 2246 - protein, 13 aa, Homo sapiens
  peptide 2202
LPPPDQPSPCKCT

SEQ ID NO: 2247 - protein, 7 aa, Homo sapiens
  peptide 2203
PPPDQPS

SEQ ID NO: 2248 - protein, 13 aa, Homo sapiens
  peptide 2204
SIQYCVPRDDAAP

SEQ ID NO: 2249 - protein, 7 aa, Homo sapiens
  peptide 2205
TPPAIYK

SEQ ID NO: 2250 - protein, 7 aa, Homo sapiens
  peptide 2206
WDPADYE

SEQ ID NO: 2251 - protein, 14 aa, Homo sapiens
  peptide 2207
DDGTLLYTMRLTVQ

SEQ ID NO: 2252 - protein, 14 aa, Homo sapiens
  peptide 2208
GLGDSITEVFTNIY

SEQ ID NO: 2253 - protein, 14 aa, Homo sapiens
  peptide 2209
MHLEDFPMDAHSCP

SEQ ID NO: 2254 - protein, 14 aa, Homo sapiens
  peptide 2210
SRLNQYDLLGQSIG

SEQ ID NO: 2255 - protein, 14 aa, Homo sapiens
  peptide 2211
VMIQNNAYAVAVAN

SEQ ID NO: 2256 - protein, 14 aa, Homo sapiens
  peptide 2212
VQAECPMHLEDFPM

SEQ ID NO: 2257 - protein, 14 aa, Homo sapiens
  peptide 2213
AVCAQSVNDPSNMS

SEQ ID NO: 2258 - protein, 14 aa, Homo sapiens
  peptide 2214
LMGCFVFVFMALLE

SEQ ID NO: 2259 - protein, 14 aa, Homo sapiens
  peptide 2215
TLEIKNEMATSEAV

SEQ ID NO: 2260 - protein, 14 aa, Homo sapiens
  peptide 2216
VNDPSNMSLVKETV

SEQ ID NO: 2261 - protein, 14 aa, Homo sapiens
  peptide 2217
DLARVPANSTSNIL

SEQ ID NO: 2262 - protein, 14 aa, Homo sapiens
  peptide 2218
DIYVTSFGPVSDVE

SEQ ID NO: 2263 - protein, 14 aa, Homo sapiens
  peptide 2219
NKESVPARTVFGIT

SEQ ID NO: 2264 - protein, 14 aa, Homo sapiens
  peptide 2220
TGKLSATPPPSAPP

SEQ ID NO: 2265 - protein, 14 aa, Homo sapiens
  peptide 2221
VCLNESPGQNQKEE

SEQ ID NO: 2266 - protein, 14 aa, Homo sapiens
  peptide 2222
AGVLTIAMPVPVIV

SEQ ID NO: 2267 - protein, 14 aa, Homo sapiens
  peptide 2223
AHSHFDYDPRADEF

SEQ ID NO: 2268 - protein, 14 aa, Homo sapiens
  peptide 2224
ALAGVLTIAMPVPV

SEQ ID NO: 2269 - protein, 14 aa, Homo sapiens
  peptide 2225
CPADVCGPLYEEEL

SEQ ID NO: 2270 - protein, 14 aa, Homo sapiens
  peptide 2226
DTCPLAQEEILEIN

SEQ ID NO: 2271 - protein, 14 aa, Homo sapiens
  peptide 2227
DVCGPLYEEELAFW

SEQ ID NO: 2272 - protein, 14 aa, Homo sapiens
  peptide 2228
EVGLSGLSSKAAKD

SEQ ID NO: 2273 - protein, 14 aa, Homo sapiens
  peptide 2229
GALCALAGVLTIAM

SEQ ID NO: 2274 - protein, 14 aa, Homo sapiens
  peptide 2230
HILNYYRTGKLHCP

SEQ ID NO: 2275 - protein, 14 aa, Homo sapiens
  peptide 2231
KLHCPADVCGPLYE

SEQ ID NO: 2276 - protein, 14 aa, Homo sapiens
  peptide 2232
LAGVLTIAMPVPVI

SEQ ID NO: 2277 - protein, 14 aa, Homo sapiens
  peptide 2233
LCALAGVLTIAMPV

SEQ ID NO: 2278 - protein, 14 aa, Homo sapiens
  peptide 2234
SLAMAKQKLPKKKK

SEQ ID NO: 2279 - protein, 14 aa, Homo sapiens
  peptide 2235
KQKLPKKKKKHIPR

SEQ ID NO: 2280 - protein, 14 aa, Homo sapiens
  peptide 2236
SHFDYDPRADEFFF

SEQ ID NO: 2281 - protein, 14 aa, Homo sapiens
  peptide 2237
YSLAMAKQKLPKKK

SEQ ID NO: 2282 - protein, 14 aa, Homo sapiens
  peptide 2238
FKQFKTQYSTRVVT

SEQ ID NO: 2283 - protein, 14 aa, Homo sapiens
  peptide 2239
RTENGSEPGASMPP

SEQ ID NO: 2284 - protein, 14 aa, Homo sapiens
  peptide 2240
TLQEMLSFEETVPV

SEQ ID NO: 2285 - protein, 14 aa, Homo sapiens
  peptide 2241
EITIGAEPKETTED

SEQ ID NO: 2286 - protein, 14 aa, Homo sapiens
  peptide 2242
LFTMQTDQSMICNL

SEQ ID NO: 2287 - protein, 14 aa, Homo sapiens
  peptide 2243
QDAGWLVGVKESDW

SEQ ID NO: 2288 - protein, 14 aa, Homo sapiens
  peptide 2244
FRNFTSATQALTEW

SEQ ID NO: 2289 - protein, 14 aa, Homo sapiens
  peptide 2245
GEPYSPCTVNGSEV

SEQ ID NO: 2290 - protein, 14 aa, Homo sapiens
  peptide 2246
NYDSLRLQPLDVIE

SEQ ID NO: 2291 - protein, 14 aa, Homo sapiens
  peptide 2247
EEEYNPFLVSSTGA

SEQ ID NO: 2292 - protein, 14 aa, Homo sapiens
  peptide 2248
GLQVILYINEEEYN

SEQ ID NO: 2293 - protein, 14 aa, Homo sapiens
  peptide 2249
ILYINEEEYNPFLV

SEQ ID NO: 2294 - protein, 14 aa, Homo sapiens
  peptide 2250
INEEEYNPFLVSST

SEQ ID NO: 2295 - protein, 14 aa, Homo sapiens
  peptide 2251
LQVILYINEEEYNP

SEQ ID NO: 2296 - protein, 14 aa, Homo sapiens
  peptide 2252
QVPLEKKINMSYSA

SEQ ID NO: 2297 - protein, 14 aa, Homo sapiens
  peptide 2253
RPGITHGVGLVLRV

SEQ ID NO: 2298 - protein, 14 aa, Homo sapiens
  peptide 2254
DAVNESGRVEFGSY

SEQ ID NO: 2299 - protein, 14 aa, Homo sapiens
  peptide 2255
GARLNRVEDKVTQL

SEQ ID NO: 2300 - protein, 14 aa, Homo sapiens
  peptide 2256
HITCDPPEERRLDH

SEQ ID NO: 2301 - protein, 14 aa, Homo sapiens
  peptide 2257
SYADALWWGVVTVT

SEQ ID NO: 2302 - protein, 14 aa, Homo sapiens
  peptide 2258
PKKSVVVKKKKFKL

SEQ ID NO: 2303 - protein, 14 aa, Homo sapiens
  peptide 2259
SPKPKKSVVVKKKK

SEQ ID NO: 2304 - protein, 14 aa, Homo sapiens
  peptide 2260
FNRQIPAAASLIQT

SEQ ID NO: 2305 - protein, 14 aa, Homo sapiens
  peptide 2261
QKHFNRQIPAAASL

SEQ ID NO: 2306 - protein, 14 aa, Homo sapiens
  peptide 2262
QLEDACEHLAEYLE

SEQ ID NO: 2307 - protein, 14 aa, Homo sapiens
  peptide 2263
QCPPESFDVILDEN

SEQ ID NO: 2308 - protein, 14 aa, Homo sapiens
  peptide 2264
CGNCSRIFHGEKLM

SEQ ID NO: 2309 - protein, 14 aa, Homo sapiens
  peptide 2265
CSRIFHGEKLMNTN

SEQ ID NO: 2310 - protein, 11 aa, Homo sapiens
  peptide 2266
DCKRNSDVMDC

SEQ ID NO: 2311 - protein, 11 aa, Homo sapiens
  peptide 2267
DDFVNVASFNS

SEQ ID NO: 2312 - protein, 11 aa, Homo sapiens
  peptide 2268
DIKRLTPRFTL

SEQ ID NO: 2313 - protein, 11 aa, Homo sapiens
  peptide 2269
ENPETYEDSFY

SEQ ID NO: 2314 - protein, 14 aa, Homo sapiens
  peptide 2270
FRTLVKSQDERYID

SEQ ID NO: 2315 - protein, 14 aa, Homo sapiens
  peptide 2271
FTLCPNGYYFAIDP

SEQ ID NO: 2316 - protein, 14 aa, Homo sapiens
  peptide 2272
GEKLMNTNLIFIMV

SEQ ID NO: 2317 - protein, 11 aa, Homo sapiens
  peptide 2273
GRFFGEIDPSL

SEQ ID NO: 2318 - protein, 11 aa, Homo sapiens
  peptide 2274
IEDANFGRQIS

SEQ ID NO: 2319 - protein, 14 aa, Homo sapiens
  peptide 2275
IFHGEKLMNTNLIF

SEQ ID NO: 2320 - protein, 14 aa, Homo sapiens
  peptide 2276
IFIMVESKGTCPCD

SEQ ID NO: 2321 - protein, 14 aa, Homo sapiens
  peptide 2277
IPSIGAIRINTQEY

SEQ ID NO: 2322 - protein, 11 aa, Homo sapiens
  peptide 2278
LCPNGYYFAID

SEQ ID NO: 2323 - protein, 14 aa, Homo sapiens
  peptide 2279
LIGPSSEEPFPSAV

SEQ ID NO: 2324 - protein, 11 aa, Homo sapiens
  peptide 2280
PNGYYFAIDPN

SEQ ID NO: 2325 - protein, 11 aa, Homo sapiens
  peptide 2281
QEYLDVLGRPM

SEQ ID NO: 2326 - protein, 11 aa, Homo sapiens
  peptide 2282
QIGRFFGEIDP

SEQ ID NO: 2327 - protein, 14 aa, Homo sapiens
  peptide 2283
RIKPVFIEDANFGR

SEQ ID NO: 2328 - protein, 11 aa, Homo sapiens
  peptide 2284
SLSKQSCITEQ

SEQ ID NO: 2329 - protein, 11 aa, Homo sapiens
  peptide 2285
SSEEPFPSAVT

SEQ ID NO: 2330 - protein, 14 aa, Homo sapiens
  peptide 2286
TLSDDDFVNVASFN

SEQ ID NO: 2331 - protein, 11 aa, Homo sapiens
  peptide 2287
TLTLFQSLLIG

SEQ ID NO: 2332 - protein, 11 aa, Homo sapiens
  peptide 2288
TLVKSQDERYI

SEQ ID NO: 2333 - protein, 11 aa, Homo sapiens
  peptide 2289
VCFDNNVLEDY

SEQ ID NO: 2334 - protein, 11 aa, Homo sapiens
  peptide 2290
VEMEDDDFTAS

SEQ ID NO: 2335 - protein, 11 aa, Homo sapiens
  peptide 2291
VKSQDERYIDK

SEQ ID NO: 2336 - protein, 14 aa, Homo sapiens
  peptide 2292
DYCNDLKISDNNTE

SEQ ID NO: 2337 - protein, 14 aa, Homo sapiens
  peptide 2293
HGEKLMNTNLIFIM

SEQ ID NO: 2338 - protein, 14 aa, Homo sapiens
  peptide 2294
PDNFEESGYTFIAP

SEQ ID NO: 2339 - protein, 14 aa, Homo sapiens
  peptide 2295
TLKPDNFEESGYTF

SEQ ID NO: 2340 - protein, 14 aa, Homo sapiens
  peptide 2296
VLNELNWTSALDEV

SEQ ID NO: 2341 - protein, 14 aa, Homo sapiens
  peptide 2297
ALLGISFFALPAGI

SEQ ID NO: 2342 - protein, 14 aa, Homo sapiens
  peptide 2298
CVIDFIVFVASVAV

SEQ ID NO: 2343 - protein, 14 aa, Homo sapiens
  peptide 2299
ELVALTAVQSEQGE

SEQ ID NO: 2344 - protein, 14 aa, Homo sapiens
  peptide 2300
HQELANECLLILEF

SEQ ID NO: 2345 - protein, 14 aa, Homo sapiens
  peptide 2301
LANECLLILEFVMI

SEQ ID NO: 2346 - protein, 14 aa, Homo sapiens
  peptide 2302
MIVVFGLEYIVRVW

SEQ ID NO: 2347 - protein, 14 aa, Homo sapiens
  peptide 2303
PRAELVALTAVQSE

SEQ ID NO: 2348 - protein, 14 aa, Homo sapiens
  peptide 2304
PSKQHLAPPTMPTS

SEQ ID NO: 2349 - protein, 14 aa, Homo sapiens
  peptide 2305
QTLSISRSVSTNMD

SEQ ID NO: 2350 - protein, 14 aa, Homo sapiens
  peptide 2306
RIRMGSSQRRTGPS

SEQ ID NO: 2351 - protein, 14 aa, Homo sapiens
  peptide 2307
YQCELTVDDIMPAV

SEQ ID NO: 2352 - protein, 14 aa, Homo sapiens
  peptide 2308
AELVALTAVQSEQG

SEQ ID NO: 2353 - protein, 14 aa, Homo sapiens
  peptide 2309
VALTAVQSEQGEAG

SEQ ID NO: 2354 - protein, 14 aa, Homo sapiens
  peptide 2310
EYFLEPEINLVTEN

SEQ ID NO: 2355 - protein, 14 aa, Homo sapiens
  peptide 2311
LEPEINLVTENTEN

SEQ ID NO: 2356 - protein, 14 aa, Homo sapiens
  peptide 2312
CFVFCFCALLEFAV

SEQ ID NO: 2357 - protein, 14 aa, Homo sapiens
  peptide 2313
IAICFVFCFCALLE

SEQ ID NO: 2358 - protein, 14 aa, Homo sapiens
  peptide 2314
KCQKEAKRSSADKG

SEQ ID NO: 2359 - protein, 14 aa, Homo sapiens
  peptide 2315
KRSSADKGVALSLD

SEQ ID NO: 2360 - protein, 11 aa, Homo sapiens
  peptide 2316
AAETQPVTDAS

SEQ ID NO: 2361 - protein, 14 aa, Homo sapiens
  peptide 2317
AAETQPVTDASPMK

SEQ ID NO: 2362 - protein, 14 aa, Homo sapiens
  peptide 2318
AEEVMLAEEDRNAE

SEQ ID NO: 2363 - protein, 11 aa, Homo sapiens
  peptide 2319
AGPREAESGEE

SEQ ID NO: 2364 - protein, 14 aa, Homo sapiens
  peptide 2320
ALEQHLPDGDKTPM

SEQ ID NO: 2365 - protein, 14 aa, Homo sapiens
  peptide 2321
ASCEALYSEMDPEE

SEQ ID NO: 2366 - protein, 11 aa, Homo sapiens
  peptide 2322
CAVGSPFARAS

SEQ ID NO: 2367 - protein, 11 aa, Homo sapiens
  peptide 2323
CEALYSEMDPE

SEQ ID NO: 2368 - protein, 14 aa, Homo sapiens
  peptide 2324
CRGQYLDYEKEEVE

SEQ ID NO: 2369 - protein, 11 aa, Homo sapiens
  peptide 2325
CRRERERRQER

SEQ ID NO: 2370 - protein, 14 aa, Homo sapiens
  peptide 2326
DEFIRVWAEYDPAA

SEQ ID NO: 2371 - protein, 11 aa, Homo sapiens
  peptide 2327
EATVVPSGNVD

SEQ ID NO: 2372 - protein, 11 aa, Homo sapiens
  peptide 2328
ETQPVTDASPM

SEQ ID NO: 2373 - protein, 11 aa, Homo sapiens
  peptide 2329
FYDAPYEYELM

SEQ ID NO: 2374 - protein, 14 aa, Homo sapiens
  peptide 2330
GPGGGERARGGGAG

SEQ ID NO: 2375 - protein, 11 aa, Homo sapiens
  peptide 2331
GPLGEATVVPS

SEQ ID NO: 2376 - protein, 11 aa, Homo sapiens
  peptide 2332
ITRRGPDGEPQ

SEQ ID NO: 2377 - protein, 14 aa, Homo sapiens
  peptide 2333
KELERDCRGQYLDY

SEQ ID NO: 2378 - protein, 11 aa, Homo sapiens
  peptide 2334
KHSVDATYEEQ

SEQ ID NO: 2379 - protein, 14 aa, Homo sapiens
  peptide 2335
KQNCFTVNRSLFVF

SEQ ID NO: 2380 - protein, 11 aa, Homo sapiens
  peptide 2336
LCEGDTECREY

SEQ ID NO: 2381 - protein, 11 aa, Homo sapiens
  peptide 2337
LFGGQFNFQDE

SEQ ID NO: 2382 - protein, 11 aa, Homo sapiens
  peptide 2338
LGEATVVPSGN

SEQ ID NO: 2383 - protein, 11 aa, Homo sapiens
  peptide 2339
LPDGDKTPMSE

SEQ ID NO: 2384 - protein, 11 aa, Homo sapiens
  peptide 2340
LTFEEAVATNS

SEQ ID NO: 2385 - protein, 11 aa, Homo sapiens
  peptide 2341
LTKDEEEMEEA

SEQ ID NO: 2386 - protein, 11 aa, Homo sapiens
  peptide 2342
MKFYDAPYEYE

SEQ ID NO: 2387 - protein, 11 aa, Homo sapiens
  peptide 2343
MPRLAAETQPV

SEQ ID NO: 2388 - protein, 11 aa, Homo sapiens
  peptide 2344
NAQELTKDEEE

SEQ ID NO: 2389 - protein, 11 aa, Homo sapiens
  peptide 2345
PDEMTVGKVYA

SEQ ID NO: 2390 - protein, 11 aa, Homo sapiens
  peptide 2346
PEAAEAPEGVD

SEQ ID NO: 2391 - protein, 11 aa, Homo sapiens
  peptide 2347
PLVVELGRDGA

SEQ ID NO: 2392 - protein, 11 aa, Homo sapiens
  peptide 2348
PVGDFPCGKEA

SEQ ID NO: 2393 - protein, 11 aa, Homo sapiens
  peptide 2349
RDCRGQYLDYE

SEQ ID NO: 2394 - protein, 11 aa, Homo sapiens
  peptide 2350
REPRRHRAHRH

SEQ ID NO: 2395 - protein, 14 aa, Homo sapiens
  peptide 2351
RLCEGDTECREYWP

SEQ ID NO: 2396 - protein, 14 aa, Homo sapiens
  peptide 2352
RPPLERGHSTEIPV

SEQ ID NO: 2397 - protein, 14 aa, Homo sapiens
  peptide 2353
RRGPDGEPQPGLES

SEQ ID NO: 2398 - protein, 14 aa, Homo sapiens
  peptide 2354
RVAYKRLVRMNMPI

SEQ ID NO: 2399 - protein, 11 aa, Homo sapiens
  peptide 2355
SADMDGAPSSA

SEQ ID NO: 2400 - protein, 11 aa, Homo sapiens
  peptide 2356
SERGRGPGPEG

SEQ ID NO: 2401 - protein, 14 aa, Homo sapiens
  peptide 2357
SFYFIVLTLFGNYT

SEQ ID NO: 2402 - protein, 11 aa, Homo sapiens
  peptide 2358
SLEKGPSLSAD

SEQ ID NO: 2403 - protein, 11 aa, Homo sapiens
  peptide 2359
SSSSSEKQRFY

SEQ ID NO: 2404 - protein, 11 aa, Homo sapiens
  peptide 2360
SVSWGTQRTQD

SEQ ID NO: 2405 - protein, 11 aa, Homo sapiens
  peptide 2361
TGCRRERERRQ

SEQ ID NO: 2406 - protein, 11 aa, Homo sapiens
  peptide 2362
THLCSTTPDRP

SEQ ID NO: 2407 - protein, 14 aa, Homo sapiens
  peptide 2363
VFLRQKSSTSLSNG

SEQ ID NO: 2408 - protein, 11 aa, Homo sapiens
  peptide 2364
VLKHSVDATYE

SEQ ID NO: 2409 - protein, 14 aa, Homo sapiens
  peptide 2365
VLMMKFYDAPYEYE

SEQ ID NO: 2410 - protein, 14 aa, Homo sapiens
  peptide 2366
VMLTGPLGEATVVP

SEQ ID NO: 2411 - protein, 11 aa, Homo sapiens
  peptide 2367
VRFGDELGGRY

SEQ ID NO: 2412 - protein, 11 aa, Homo sapiens
  peptide 2368
VYAALMIFDFY

SEQ ID NO: 2413 - protein, 11 aa, Homo sapiens
  peptide 2369
YKRLVRMNMPI

SEQ ID NO: 2414 - protein, 14 aa, Homo sapiens
  peptide 2370
GGAIQNQESGIKES

SEQ ID NO: 2415 - protein, 14 aa, Homo sapiens
  peptide 2371
GIKIIALGFVFHKG

SEQ ID NO: 2416 - protein, 14 aa, Homo sapiens
  peptide 2372
HHHRCHRRRDRKQR

SEQ ID NO: 2417 - protein, 14 aa, Homo sapiens
  peptide 2373
NLANAQELTKDEEE

SEQ ID NO: 2418 - protein, 14 aa, Homo sapiens
  peptide 2374
QERRQPSSSSSEKQ

SEQ ID NO: 2419 - protein, 14 aa, Homo sapiens
  peptide 2375
RNVTRMGSQPPDPN

SEQ ID NO: 2420 - protein, 14 aa, Homo sapiens
  peptide 2376
SSSSSEKQRFYSCD

SEQ ID NO: 2421 - protein, 11 aa, Homo sapiens
  peptide 2377
ALAIYIPFPED

SEQ ID NO: 2422 - protein, 14 aa, Homo sapiens
  peptide 2378
ANCVALAIYIPFPE

SEQ ID NO: 2423 - protein, 14 aa, Homo sapiens
  peptide 2379
CLAMQHYEQSKMFN

SEQ ID NO: 2424 - protein, 14 aa, Homo sapiens
  peptide 2380
CLGEQEYFSSEECY

SEQ ID NO: 2425 - protein, 14 aa, Homo sapiens
  peptide 2381
CQAISKSKLSRRWR

SEQ ID NO: 2426 - protein, 14 aa, Homo sapiens
  peptide 2382
CVALAIYIPFPEDD

SEQ ID NO: 2427 - protein, 11 aa, Homo sapiens
  peptide 2383
DACDLTIDEME

SEQ ID NO: 2428 - protein, 14 aa, Homo sapiens
  peptide 2384
DDDSPVCYDSRRSP

SEQ ID NO: 2429 - protein, 11 aa, Homo sapiens
  peptide 2385
DDSNSTNHNLE

SEQ ID NO: 2430 - protein, 11 aa, Homo sapiens
  peptide 2386
DDYREEDEDKD

SEQ ID NO: 2431 - protein, 14 aa, Homo sapiens
  peptide 2387
DEEPDPGRDEEDLA

SEQ ID NO: 2432 - protein, 11 aa, Homo sapiens
  peptide 2388
DFGPGYSDEEP

SEQ ID NO: 2433 - protein, 14 aa, Homo sapiens
  peptide 2389
DIFILLAIFANCVA

SEQ ID NO: 2434 - protein, 11 aa, Homo sapiens
  peptide 2390
DPESDYNPGEE

SEQ ID NO: 2435 - protein, 14 aa, Homo sapiens
  peptide 2391
DPYPPCDVPVGEEE

SEQ ID NO: 2436 - protein, 11 aa, Homo sapiens
  peptide 2392
DVPVGEEEEEE

SEQ ID NO: 2437 - protein, 14 aa, Homo sapiens
  peptide 2393
DVPVGEEEEEEEED

SEQ ID NO: 2438 - protein, 14 aa, Homo sapiens
  peptide 2394
EDKDPYPPCDVPVG

SEQ ID NO: 2439 - protein, 11 aa, Homo sapiens
  peptide 2395
EEEEEDEPEVP

SEQ ID NO: 2440 - protein, 11 aa, Homo sapiens
  peptide 2396
EEEEEEEDEPE

SEQ ID NO: 2441 - protein, 14 aa, Homo sapiens
  peptide 2397
EEEEEEEDEPEVPA

SEQ ID NO: 2442 - protein, 11 aa, Homo sapiens
  peptide 2398
EEPDPGRDEED

SEQ ID NO: 2443 - protein, 14 aa, Homo sapiens
  peptide 2399
EKVEYAFLIIFTVE

SEQ ID NO: 2444 - protein, 11 aa, Homo sapiens
  peptide 2400
EPEETKREEED

SEQ ID NO: 2445 - protein, 11 aa, Homo sapiens
  peptide 2401
EQEYFSSEECY

SEQ ID NO: 2446 - protein, 14 aa, Homo sapiens
  peptide 2402
EQEYFSSEECYEDD

SEQ ID NO: 2447 - protein, 11 aa, Homo sapiens
  peptide 2403
ESDYNPGEEYT

SEQ ID NO: 2448 - protein, 14 aa, Homo sapiens
  peptide 2404
ETESVNTENVSGEG

SEQ ID NO: 2449 - protein, 11 aa, Homo sapiens
  peptide 2405
EVPAGPRPRRI

SEQ ID NO: 2450 - protein, 11 aa, Homo sapiens
  peptide 2406
EYFSSEECYED

SEQ ID NO: 2451 - protein, 11 aa, Homo sapiens
  peptide 2407
FGIQSSAISVV

SEQ ID NO: 2452 - protein, 11 aa, Homo sapiens
  peptide 2408
FLEDDDSPVCY

SEQ ID NO: 2453 - protein, 14 aa, Homo sapiens
  peptide 2409
FNFECLRRQSSQEE

SEQ ID NO: 2454 - protein, 14 aa, Homo sapiens
  peptide 2410
FQCITMEGWTDVLY

SEQ ID NO: 2455 - protein, 11 aa, Homo sapiens
  peptide 2411
FRNTILGYFDY

SEQ ID NO: 2456 - protein, 11 aa, Homo sapiens
  peptide 2412
GCHKLINHHIF

SEQ ID NO: 2457 - protein, 11 aa, Homo sapiens
  peptide 2413
GEEEEEEEEDE

SEQ ID NO: 2458 - protein, 14 aa, Homo sapiens
  peptide 2414
GGEEGKRNTSMPTS

SEQ ID NO: 2459 - protein, 14 aa, Homo sapiens
  peptide 2415
GYSDEEPDPGRDEE

SEQ ID NO: 2460 - protein, 11 aa, Homo sapiens
  peptide 2416
HPQGFLEDDDS

SEQ ID NO: 2461 - protein, 11 aa, Homo sapiens
  peptide 2417
HVNSDRRDSLQ

SEQ ID NO: 2462 - protein, 14 aa, Homo sapiens
  peptide 2418
IADACDLTIDEMES

SEQ ID NO: 2463 - protein, 14 aa, Homo sapiens
  peptide 2419
ILNMVFTGVFTVEM

SEQ ID NO: 2464 - protein, 11 aa, Homo sapiens
  peptide 2420
ILYKDGDVDSP

SEQ ID NO: 2465 - protein, 14 aa, Homo sapiens
  peptide 2421
IPFPEDDSNSTNHN

SEQ ID NO: 2466 - protein, 11 aa, Homo sapiens
  peptide 2422
IVAEEDPAPCA

SEQ ID NO: 2467 - protein, 14 aa, Homo sapiens
  peptide 2423
KGKFYRCTDEAKSN

SEQ ID NO: 2468 - protein, 11 aa, Homo sapiens
  peptide 2424
KQRSADSLVEA

SEQ ID NO: 2469 - protein, 14 aa, Homo sapiens
  peptide 2425
KRQQYAKSKKQGNS

SEQ ID NO: 2470 - protein, 11 aa, Homo sapiens
  peptide 2426
KSKLSRRWRRW

SEQ ID NO: 2471 - protein, 11 aa, Homo sapiens
  peptide 2427
KVTIDDYREED

SEQ ID NO: 2472 - protein, 11 aa, Homo sapiens
  peptide 2428
LEEDLKGYLDW

SEQ ID NO: 2473 - protein, 11 aa, Homo sapiens
  peptide 2429
LFILYKDGDVD

SEQ ID NO: 2474 - protein, 11 aa, Homo sapiens
  peptide 2430
LKMTTFGAFLH

SEQ ID NO: 2475 - protein, 14 aa, Homo sapiens
  peptide 2431
LQDDEPEETKREEE

SEQ ID NO: 2476 - protein, 14 aa, Homo sapiens
  peptide 2432
LQDFGPGYSDEEPD

SEQ ID NO: 2477 - protein, 11 aa, Homo sapiens
  peptide 2433
LREKQQLEEDL

SEQ ID NO: 2478 - protein, 14 aa, Homo sapiens
  peptide 2434
LSRRWRRWNRFNRR

SEQ ID NO: 2479 - protein, 14 aa, Homo sapiens
  peptide 2435
LTIDEMESAASTLL

SEQ ID NO: 2480 - protein, 14 aa, Homo sapiens
  peptide 2436
MMKKMQHQRQQQAD

SEQ ID NO: 2481 - protein, 14 aa, Homo sapiens
  peptide 2437
MPTSETESVNTENV

SEQ ID NO: 2482 - protein, 11 aa, Homo sapiens
  peptide 2438
MVFTGVFTVEM

SEQ ID NO: 2483 - protein, 14 aa, Homo sapiens
  peptide 2439
NKVTIDDYREEDED

SEQ ID NO: 2484 - protein, 11 aa, Homo sapiens
  peptide 2440
NMKEKIAPIPE

SEQ ID NO: 2485 - protein, 14 aa, Homo sapiens
  peptide 2441
NMKEKIAPIPEGSA

SEQ ID NO: 2486 - protein, 11 aa, Homo sapiens
  peptide 2442
NSDRRDSLQQT

SEQ ID NO: 2487 - protein, 11 aa, Homo sapiens
  peptide 2443
PCDVPVGEEEE

SEQ ID NO: 2488 - protein, 14 aa, Homo sapiens
  peptide 2444
PDPGRDEEDLADEM

SEQ ID NO: 2489 - protein, 11 aa, Homo sapiens
  peptide 2445
PEDDSNSTNHN

SEQ ID NO: 2490 - protein, 14 aa, Homo sapiens
  peptide 2446
PEDDSNSTNHNLEK

SEQ ID NO: 2491 - protein, 14 aa, Homo sapiens
  peptide 2447
PPASDTEKPLFPPA

SEQ ID NO: 2492 - protein, 14 aa, Homo sapiens
  peptide 2448
PPCDVPVGEEEEEE

SEQ ID NO: 2493 - protein, 14 aa, Homo sapiens
  peptide 2449
PTSETESVNTENVS

SEQ ID NO: 2494 - protein, 11 aa, Homo sapiens
  peptide 2450
PVGEEEEEEEE

SEQ ID NO: 2495 - protein, 11 aa, Homo sapiens
  peptide 2451
QGFLEDDDSPV

SEQ ID NO: 2496 - protein, 11 aa, Homo sapiens
  peptide 2452
QKLREKQQLEE

SEQ ID NO: 2497 - protein, 14 aa, Homo sapiens
  peptide 2453
QLFKGKFYRCTDEA

SEQ ID NO: 2498 - protein, 11 aa, Homo sapiens
  peptide 2454
QTVLSWQAAID

SEQ ID NO: 2499 - protein, 14 aa, Homo sapiens
  peptide 2455
QVPTSTNANLNNAN

SEQ ID NO: 2500 - protein, 11 aa, Homo sapiens
  peptide 2456
RAVIKKIWKKT

SEQ ID NO: 2501 - protein, 14 aa, Homo sapiens
  peptide 2457
RGLFILYKDGDVDS

SEQ ID NO: 2502 - protein, 11 aa, Homo sapiens
  peptide 2458
RSDSGDEQLPT

SEQ ID NO: 2503 - protein, 14 aa, Homo sapiens
  peptide 2459
SELNMKEKIAPIPE

SEQ ID NO: 2504 - protein, 14 aa, Homo sapiens
  peptide 2460
SQRKRQQYAKSKKQ

SEQ ID NO: 2505 - protein, 11 aa, Homo sapiens
  peptide 2461
SRRSPRRRLLP

SEQ ID NO: 2506 - protein, 14 aa, Homo sapiens
  peptide 2462
SSKQTVLSWQAAID

SEQ ID NO: 2507 - protein, 14 aa, Homo sapiens
  peptide 2463
TESVNTENVSGEGE

SEQ ID NO: 2508 - protein, 11 aa, Homo sapiens
  peptide 2464
TETILVELEIM

SEQ ID NO: 2509 - protein, 11 aa, Homo sapiens
  peptide 2465
TIDDYREEDED

SEQ ID NO: 2510 - protein, 11 aa, Homo sapiens
  peptide 2466
TSETESVNTEN

SEQ ID NO: 2511 - protein, 11 aa, Homo sapiens
  peptide 2467
VETFLKIIAYG

SEQ ID NO: 2512 - protein, 14 aa, Homo sapiens
  peptide 2468
VGEEEEEEEEDEPE

SEQ ID NO: 2513 - protein, 11 aa, Homo sapiens
  peptide 2469
VIKKIWKKTSM

SEQ ID NO: 2514 - protein, 11 aa, Homo sapiens
  peptide 2470
WITQAEDIDPE

SEQ ID NO: 2515 - protein, 11 aa, Homo sapiens
  peptide 2471
YAFLIIFTVET

SEQ ID NO: 2516 - protein, 11 aa, Homo sapiens
  peptide 2472
YAFTAIFTVEI

SEQ ID NO: 2517 - protein, 14 aa, Homo sapiens
  peptide 2473
YFDYAFTAIFTVEI

SEQ ID NO: 2518 - protein, 14 aa, Homo sapiens
  peptide 2474
YFRDPHCLGEQEYF

SEQ ID NO: 2519 - protein, 14 aa, Homo sapiens
  peptide 2475
SMPTSETESVNTEN

SEQ ID NO: 2520 - protein, 14 aa, Homo sapiens
  peptide 2476
AEDIDPENEEEGGE

SEQ ID NO: 2521 - protein, 14 aa, Homo sapiens
  peptide 2477
CDLQDDEPEETKRE

SEQ ID NO: 2522 - protein, 14 aa, Homo sapiens
  peptide 2478
EDDSNSTNHNLEKV

SEQ ID NO: 2523 - protein, 14 aa, Homo sapiens
  peptide 2479
ESVNTENVSGEGEN

SEQ ID NO: 2524 - protein, 14 aa, Homo sapiens
  peptide 2480
GEEEEEEEEDEPEV

SEQ ID NO: 2525 - protein, 14 aa, Homo sapiens
  peptide 2481
IDDYREEDEDKDPY

SEQ ID NO: 2526 - protein, 14 aa, Homo sapiens
  peptide 2482
ITQAEDIDPENEEE

SEQ ID NO: 2527 - protein, 14 aa, Homo sapiens
  peptide 2483
LLDQVVPPAGDDEV

SEQ ID NO: 2528 - protein, 14 aa, Homo sapiens
  peptide 2484
PASDTEKPLFPPAG

SEQ ID NO: 2529 - protein, 14 aa, Homo sapiens
  peptide 2485
PCDVPVGEEEEEEE

SEQ ID NO: 2530 - protein, 14 aa, Homo sapiens
  peptide 2486
QDFGPGYSDEEPDP

SEQ ID NO: 2531 - protein, 14 aa, Homo sapiens
  peptide 2487
QGFLEDDDSPVCYD

SEQ ID NO: 2532 - protein, 14 aa, Homo sapiens
  peptide 2488
RLFRVMRLVKLLSR

SEQ ID NO: 2533 - protein, 14 aa, Homo sapiens
  peptide 2489
RQQYAKSKKQGNSS

SEQ ID NO: 2534 - protein, 14 aa, Homo sapiens
  peptide 2490
VPPAGDDEVTVGKF

SEQ ID NO: 2535 - protein, 14 aa, Homo sapiens
  peptide 2491
VPVGEEEEEEEEDE

SEQ ID NO: 2536 - protein, 14 aa, Homo sapiens
  peptide 2492
GFLQEFSKEERDPV

SEQ ID NO: 2537 - protein, 14 aa, Homo sapiens
  peptide 2493
GVSSSEMNVTWEPV

SEQ ID NO: 2538 - protein, 14 aa, Homo sapiens
  peptide 2494
QLNLAAEDTRLFAP

SEQ ID NO: 2539 - protein, 14 aa, Homo sapiens
  peptide 2495
SGLSGGGGAPGELI

SEQ ID NO: 2540 - protein, 14 aa, Homo sapiens
  peptide 2496
TFTWTLDDFPIDFD

SEQ ID NO: 2541 - protein, 14 aa, Homo sapiens
  peptide 2497
AQCPPEMFDIILDE

SEQ ID NO: 2542 - protein, 14 aa, Homo sapiens
  peptide 2498
DACEHLAEYLEAYW

SEQ ID NO: 2543 - protein, 11 aa, Homo sapiens
  peptide 2499
DMETDPSEGPG

SEQ ID NO: 2544 - protein, 14 aa, Homo sapiens
  peptide 2500
EEDYEEELTDNRNR

SEQ ID NO: 2545 - protein, 14 aa, Homo sapiens
  peptide 2501
EKLAQCPPEMFDII

SEQ ID NO: 2546 - protein, 14 aa, Homo sapiens
  peptide 2502
GRFKRSDGSTSSDT

SEQ ID NO: 2547 - protein, 11 aa, Homo sapiens
  peptide 2503
PPARQGSWEDE

SEQ ID NO: 2548 - protein, 14 aa, Homo sapiens
  peptide 2504
PQGKYSKRKGRFKR

SEQ ID NO: 2549 - protein, 14 aa, Homo sapiens
  peptide 2505
QGPYLASGDQPLER

SEQ ID NO: 2550 - protein, 14 aa, Homo sapiens
  peptide 2506
RGPYPPSQEIPMEV

SEQ ID NO: 2551 - protein, 14 aa, Homo sapiens
  peptide 2507
TPPARQGSWEDEEE

SEQ ID NO: 2552 - protein, 11 aa, Homo sapiens
  peptide 2508
YLASGDQPLER

SEQ ID NO: 2553 - protein, 14 aa, Homo sapiens
  peptide 2509
ARQGSWEDEEEDYE

SEQ ID NO: 2554 - protein, 14 aa, Homo sapiens
  peptide 2510
DADTPGSRNSAYTE

SEQ ID NO: 2555 - protein, 14 aa, Homo sapiens
  peptide 2511
EDEEEDYEEELTDN

SEQ ID NO: 2556 - protein, 14 aa, Homo sapiens
  peptide 2512
GSWEDEEEDYEEEL

SEQ ID NO: 2557 - protein, 14 aa, Homo sapiens
  peptide 2513
NVGYNPSPGDEVPV

SEQ ID NO: 2558 - protein, 14 aa, Homo sapiens
  peptide 2514
RNKARYCAEGGGPV

SEQ ID NO: 2559 - protein, 14 aa, Homo sapiens
  peptide 2515
TPGSRNSAYTELGD

SEQ ID NO: 2560 - protein, 14 aa, Homo sapiens
  peptide 2516
KRSDGSTSSDTTSN

SEQ ID NO: 2561 - protein, 14 aa, Homo sapiens
  peptide 2517
ADVCGPLFEEELTF

SEQ ID NO: 2562 - protein, 14 aa, Homo sapiens
  peptide 2518
LRDLPLQHSPEAAC

SEQ ID NO: 2563 - protein, 14 aa, Homo sapiens
  peptide 2519
RREVETEPILTYIE

SEQ ID NO: 2564 - protein, 14 aa, Homo sapiens
  peptide 2520
HCPADVCGPLFEEE

SEQ ID NO: 2565 - protein, 14 aa, Homo sapiens
  peptide 2521
CCPDTLDFVKNLLN

SEQ ID NO: 2566 - protein, 14 aa, Homo sapiens
  peptide 2522
DHTDFKNIPIGFWW

SEQ ID NO: 2567 - protein, 14 aa, Homo sapiens
  peptide 2523
EELTFWGIDETDVE

SEQ ID NO: 2568 - protein, 14 aa, Homo sapiens
  peptide 2524
FLVRIVCCPDTLDF

SEQ ID NO: 2569 - protein, 14 aa, Homo sapiens
  peptide 2525
KQKLPKKRKKHVPR

SEQ ID NO: 2570 - protein, 14 aa, Homo sapiens
  peptide 2526
LFEEELTFWGIDET

SEQ ID NO: 2571 - protein, 14 aa, Homo sapiens
  peptide 2527
TLEFLVRIVCCPDT

SEQ ID NO: 2572 - protein, 11 aa, Homo sapiens
  peptide 2528
AGGQKCTVSIN

SEQ ID NO: 2573 - protein, 14 aa, Homo sapiens
  peptide 2529
ALVLFSVGSSLIFL

SEQ ID NO: 2574 - protein, 11 aa, Homo sapiens
  peptide 2530
AYTENGEWAID

SEQ ID NO: 2575 - protein, 14 aa, Homo sapiens
  peptide 2531
AYTENGEWAIDFCP

SEQ ID NO: 2576 - protein, 11 aa, Homo sapiens
  peptide 2532
CCVDAVNFVAE

SEQ ID NO: 2577 - protein, 14 aa, Homo sapiens
  peptide 2533
DTEAYTENGEWAID

SEQ ID NO: 2578 - protein, 14 aa, Homo sapiens
  peptide 2534
IFRSQTYNAEEVEF

SEQ ID NO: 2579 - protein, 11 aa, Homo sapiens
  peptide 2535
LGVLLLLGLLG

SEQ ID NO: 2580 - protein, 14 aa, Homo sapiens
  peptide 2536
NNYDPGSRPVREPE

SEQ ID NO: 2581 - protein, 11 aa, Homo sapiens
  peptide 2537
PPRRASSVGLL

SEQ ID NO: 2582 - protein, 11 aa, Homo sapiens
  peptide 2538
SQTYNAEEVEF

SEQ ID NO: 2583 - protein, 11 aa, Homo sapiens
  peptide 2539
TYNAEEVEFTF

SEQ ID NO: 2584 - protein, 14 aa, Homo sapiens
  peptide 2540
VCAVEVTYFPFDWQ

SEQ ID NO: 2585 - protein, 11 aa, Homo sapiens
  peptide 2541
VDAVNFVAEST

SEQ ID NO: 2586 - protein, 14 aa, Homo sapiens
  peptide 2542
VGLLLRAEELILKK

SEQ ID NO: 2587 - protein, 11 aa, Homo sapiens
  peptide 2543
VRCCVDAVNFV

SEQ ID NO: 2588 - protein, 14 aa, Homo sapiens
  peptide 2544
VRCCVDAVNFVAES

SEQ ID NO: 2589 - protein, 13 aa, Homo sapiens
  peptide 2545
KKPRSELVFEGQR

SEQ ID NO: 2590 - protein, 13 aa, Homo sapiens
  peptide 2546
LGAAAPEVRCCVD

SEQ ID NO: 2591 - protein, 13 aa, Homo sapiens
  peptide 2547
LGLLGRGVGKNEE

SEQ ID NO: 2592 - protein, 13 aa, Homo sapiens
  peptide 2548
NAEEVEFTFAVDN

SEQ ID NO: 2593 - protein, 13 aa, Homo sapiens
  peptide 2549
TENGEWAIDFCPG

SEQ ID NO: 2594 - protein, 7 aa, Homo sapiens
  peptide 2550
TLTTSVW

SEQ ID NO: 2595 - protein, 7 aa, Homo sapiens
  peptide 2551
YSLIIRR

SEQ ID NO: 2596 - protein, 14 aa, Homo sapiens
  peptide 2552
ERESKAEKVLQFDP

SEQ ID NO: 2597 - protein, 14 aa, Homo sapiens
  peptide 2553
FSWGVLLNSGIGEG

SEQ ID NO: 2598 - protein, 14 aa, Homo sapiens
  peptide 2554
GETEKPRGYQMSTR

SEQ ID NO: 2599 - protein, 14 aa, Homo sapiens
  peptide 2555
GINDPRLRNPSDKF

SEQ ID NO: 2600 - protein, 14 aa, Homo sapiens
  peptide 2556
GSWKIQLNATSVTH

SEQ ID NO: 2601 - protein, 14 aa, Homo sapiens
  peptide 2557
LHAFIWDSAVLEFE

SEQ ID NO: 2602 - protein, 14 aa, Homo sapiens
  peptide 2558
LLEERESKAEKVLQ

SEQ ID NO: 2603 - protein, 14 aa, Homo sapiens
  peptide 2559
MLYLLDRFSPFGRF

SEQ ID NO: 2604 - protein, 14 aa, Homo sapiens
  peptide 2560
NDHFTPTPVSYTAG

SEQ ID NO: 2605 - protein, 14 aa, Homo sapiens
  peptide 2561
PLTINNERAQYIEF

SEQ ID NO: 2606 - protein, 14 aa, Homo sapiens
  peptide 2562
RFKVNSEEEEEDAL

SEQ ID NO: 2607 - protein, 14 aa, Homo sapiens
  peptide 2563
RRSSKDTSTGGGRG

SEQ ID NO: 2608 - protein, 14 aa, Homo sapiens
  peptide 2564
SDDHEGRAAQKRLE

SEQ ID NO: 2609 - protein, 14 aa, Homo sapiens
  peptide 2565
FDPGTKNVTALLME

SEQ ID NO: 2610 - protein, 14 aa, Homo sapiens
  peptide 2566
KLHAFIWDSAVLEF

SEQ ID NO: 2611 - protein, 14 aa, Homo sapiens
  peptide 2567
SEEEEEDALTLSSA

SEQ ID NO: 2612 - protein, 11 aa, Homo sapiens
  peptide 2568
LPDFMLVLIVL

SEQ ID NO: 2613 - protein, 11 aa, Homo sapiens
  peptide 2569
SSSTYHPMAPW

SEQ ID NO: 2614 - protein, 14 aa, Homo sapiens
  peptide 2570
TVFVINVHHRSSST

SEQ ID NO: 2615 - protein, 11 aa, Homo sapiens
  peptide 2571
VLFENADGRFE

SEQ ID NO: 2616 - protein, 7 aa, Homo sapiens
  peptide 2572
KEESQPV

SEQ ID NO: 2617 - protein, 13 aa, Homo sapiens
  peptide 2573
LIVLGIPSSATTG

SEQ ID NO: 2618 - protein, 13 aa, Homo sapiens
  peptide 2574
YFGLKISQLVDVD

SEQ ID NO: 2619 - protein, 14 aa, Homo sapiens
  peptide 2575
ARRPPASSEQAQQE

SEQ ID NO: 2620 - protein, 11 aa, Homo sapiens
  peptide 2576
IIRRKPLFYII

SEQ ID NO: 2621 - protein, 11 aa, Homo sapiens
  peptide 2577
LGYISKAEEYF

SEQ ID NO: 2622 - protein, 14 aa, Homo sapiens
  peptide 2578
NQPPPQPFPGDPYS

SEQ ID NO: 2623 - protein, 11 aa, Homo sapiens
  peptide 2579
NVDPRAPLDSP

SEQ ID NO: 2624 - protein, 11 aa, Homo sapiens
  peptide 2580
PASSEQAQQEL

SEQ ID NO: 2625 - protein, 14 aa, Homo sapiens
  peptide 2581
PPASSEQAQQELFN

SEQ ID NO: 2626 - protein, 14 aa, Homo sapiens
  peptide 2582
PPQPFPGDPYSYNV

SEQ ID NO: 2627 - protein, 11 aa, Homo sapiens
  peptide 2583
PQPFPGDPYSY

SEQ ID NO: 2628 - protein, 14 aa, Homo sapiens
  peptide 2584
PSPGALVRRSSSLG

SEQ ID NO: 2629 - protein, 11 aa, Homo sapiens
  peptide 2585
QNCSLKFSSLK

SEQ ID NO: 2630 - protein, 11 aa, Homo sapiens
  peptide 2586
RRKPLFYIINI

SEQ ID NO: 2631 - protein, 11 aa, Homo sapiens
  peptide 2587
VEWIIIDPEGF

SEQ ID NO: 2632 - protein, 14 aa, Homo sapiens
  peptide 2588
VRRSSSLGYISKAE

SEQ ID NO: 2633 - protein, 7 aa, Homo sapiens
  peptide 2589
FSSLKYT

SEQ ID NO: 2634 - protein, 13 aa, Homo sapiens
  peptide 2590
IRRKPLFYIINIL

SEQ ID NO: 2635 - protein, 13 aa, Homo sapiens
  peptide 2591
NYNEEKDSWNRVA

SEQ ID NO: 2636 - protein, 13 aa, Homo sapiens
  peptide 2592
PFPGDPYSYNVQD

SEQ ID NO: 2637 - protein, 13 aa, Homo sapiens
  peptide 2593
VYNQPPPQPFPGD

SEQ ID NO: 2638 - protein, 11 aa, Homo sapiens
  peptide 2594
AEEEPSVEPVK

SEQ ID NO: 2639 - protein, 14 aa, Homo sapiens
  peptide 2595
DACEHLADYLEAYW

SEQ ID NO: 2640 - protein, 14 aa, Homo sapiens
  peptide 2596
DREAVRREAERQAQ

SEQ ID NO: 2641 - protein, 11 aa, Homo sapiens
  peptide 2597
GTSRGLSRQET

SEQ ID NO: 2642 - protein, 14 aa, Homo sapiens
  peptide 2598
HKSKDRYCEKDGEV

SEQ ID NO: 2643 - protein, 14 aa, Homo sapiens
  peptide 2599
QLEDACEHLADYLE

SEQ ID NO: 2644 - protein, 11 aa, Homo sapiens
  peptide 2600
RKSTPPSSAID

SEQ ID NO: 2645 - protein, 11 aa, Homo sapiens
  peptide 2601
RSGTSRGLSRQ

SEQ ID NO: 2646 - protein, 11 aa, Homo sapiens
  peptide 2602
STPPSSAIDID

SEQ ID NO: 2647 - protein, 14 aa, Homo sapiens
  peptide 2603
HDHVDHYASHRDHN

SEQ ID NO: 2648 - protein, 14 aa, Homo sapiens
  peptide 2604
PTLASNSQGSQGDQ

SEQ ID NO: 2649 - protein, 14 aa, Homo sapiens
  peptide 2605
VDHYASHRDHNHRD

SEQ ID NO: 2650 - protein, 14 aa, Homo sapiens
  peptide 2606
ELGEEAMEKFREDE

SEQ ID NO: 2651 - protein, 14 aa, Homo sapiens
  peptide 2607
KSEYMEIEEDMNNS

SEQ ID NO: 2652 - protein, 14 aa, Homo sapiens
  peptide 2608
MFSEEIKFYELGEE

SEQ ID NO: 2653 - protein, 14 aa, Homo sapiens
  peptide 2609
MSGENVDEASAAPG

SEQ ID NO: 2654 - protein, 14 aa, Homo sapiens
  peptide 2610
MTVMSGENVDEASA

SEQ ID NO: 2655 - protein, 14 aa, Homo sapiens
  peptide 2611
PLDMFSEEIKFYEL

SEQ ID NO: 2656 - protein, 14 aa, Homo sapiens
  peptide 2612
SAAPGHPQDGSYPR

SEQ ID NO: 2657 - protein, 14 aa, Homo sapiens
  peptide 2613
SNIFTDPFFIVETL

SEQ ID NO: 2658 - protein, 14 aa, Homo sapiens
  peptide 2614
AAQIAQALLGAEER

SEQ ID NO: 2659 - protein, 14 aa, Homo sapiens
  peptide 2615
ALLALTARESSVRS

SEQ ID NO: 2660 - protein, 14 aa, Homo sapiens
  peptide 2616
CELCGYSRAEVMQR

SEQ ID NO: 2661 - protein, 14 aa, Homo sapiens
  peptide 2617
ENCAVIYCNDGFCE

SEQ ID NO: 2662 - protein, 14 aa, Homo sapiens
  peptide 2618
FDLLIFGSGSEELI

SEQ ID NO: 2663 - protein, 14 aa, Homo sapiens
  peptide 2619
FLCLVDVVPVKNED

SEQ ID NO: 2664 - protein, 14 aa, Homo sapiens
  peptide 2620
GEPLMEDCEKSSDT

SEQ ID NO: 2665 - protein, 14 aa, Homo sapiens
  peptide 2621
IPGSPGSTELEGGF

SEQ ID NO: 2666 - protein, 14 aa, Homo sapiens
  peptide 2622
KLPALLALTARESS

SEQ ID NO: 2667 - protein, 14 aa, Homo sapiens
  peptide 2623
LIAHWLACIWYAIG

SEQ ID NO: 2668 - protein, 14 aa, Homo sapiens
  peptide 2624
LQADICLHLNRSLL

SEQ ID NO: 2669 - protein, 14 aa, Homo sapiens
  peptide 2625
LTSVGFGNVSPNTN

SEQ ID NO: 2670 - protein, 14 aa, Homo sapiens
  peptide 2626
LVRVARKLDRYSEY

SEQ ID NO: 2671 - protein, 14 aa, Homo sapiens
  peptide 2627
RDDLLEVLDMYPEF

SEQ ID NO: 2672 - protein, 14 aa, Homo sapiens
  peptide 2628
RRRTDKDTEQPGEV

SEQ ID NO: 2673 - protein, 14 aa, Homo sapiens
  peptide 2629
SPGSTELEGGFSRQ

SEQ ID NO: 2674 - protein, 14 aa, Homo sapiens
  peptide 2630
SSVRSGGAGGAGAP

SEQ ID NO: 2675 - protein, 14 aa, Homo sapiens
  peptide 2631
MIPGSPGSTELEGG

SEQ ID NO: 2676 - protein, 14 aa, Homo sapiens
  peptide 2632
PALLALTARESSVR

SEQ ID NO: 2677 - protein, 14 aa, Homo sapiens
  peptide 2633
PQEGPTRRLSLPGQ

SEQ ID NO: 2678 - protein, 14 aa, Homo sapiens
  peptide 2634
PYSAAFLLKETEEG

SEQ ID NO: 2679 - protein, 14 aa, Homo sapiens
  peptide 2635
SRQRKRKLSFRRRT

SEQ ID NO: 2680 - protein, 14 aa, Homo sapiens
  peptide 2636
ASCYGQMERPEVPM

SEQ ID NO: 2681 - protein, 14 aa, Homo sapiens
  peptide 2637
DQYKLYSKHFTLKD

SEQ ID NO: 2682 - protein, 14 aa, Homo sapiens
  peptide 2638
EAKASCYGQMERPE

SEQ ID NO: 2683 - protein, 14 aa, Homo sapiens
  peptide 2639
FTGVCSDRPGLLFS

SEQ ID NO: 2684 - protein, 14 aa, Homo sapiens
  peptide 2640
GKAPHGPSFTIGKA

SEQ ID NO: 2685 - protein, 14 aa, Homo sapiens
  peptide 2641
IYDAAVLNYKAGRD

SEQ ID NO: 2686 - protein, 14 aa, Homo sapiens
  peptide 2642
KAIWLLWGLVFNNS

SEQ ID NO: 2687 - protein, 14 aa, Homo sapiens
  peptide 2643
KEFPSGLISVSYDD

SEQ ID NO: 2688 - protein, 14 aa, Homo sapiens
  peptide 2644
KFVKINNSTNEGMN

SEQ ID NO: 2689 - protein, 14 aa, Homo sapiens
  peptide 2645
LAKGKAPHGPSFTI

SEQ ID NO: 2690 - protein, 14 aa, Homo sapiens
  peptide 2646
LALLQFVGDGEMEE

SEQ ID NO: 2691 - protein, 14 aa, Homo sapiens
  peptide 2647
LISVSYDDWDYSLE

SEQ ID NO: 2692 - protein, 14 aa, Homo sapiens
  peptide 2648
LWLTGICHNEKNEV

SEQ ID NO: 2693 - protein, 14 aa, Homo sapiens
  peptide 2649
NSVPVQNPKGTTSK

SEQ ID NO: 2694 - protein, 14 aa, Homo sapiens
  peptide 2650
PHGPSFTIGKAIWL

SEQ ID NO: 2695 - protein, 14 aa, Homo sapiens
  peptide 2651
PVQNPKGTTSKIMV

SEQ ID NO: 2696 - protein, 14 aa, Homo sapiens
  peptide 2652
TIGKAIWLLWGLVF

SEQ ID NO: 2697 - protein, 14 aa, Homo sapiens
  peptide 2653
VFNNSVPVQNPKGT

SEQ ID NO: 2698 - protein, 14 aa, Homo sapiens
  peptide 2654
WGLVFNNSVPVQNP

SEQ ID NO: 2699 - protein, 14 aa, Homo sapiens
  peptide 2655
WLLWGLVFNNSVPV

SEQ ID NO: 2700 - protein, 14 aa, Homo sapiens
  peptide 2656
PCRKFVKINNSTNE

SEQ ID NO: 2701 - protein, 14 aa, Homo sapiens
  peptide 2657
AAAMALSLITFIWE

SEQ ID NO: 2702 - protein, 14 aa, Homo sapiens
  peptide 2658
SNRRVYKKMPSIES

SEQ ID NO: 2703 - protein, 14 aa, Homo sapiens
  peptide 2659
TLPENVDFPDPYQD

SEQ ID NO: 2704 - protein, 14 aa, Homo sapiens
  peptide 2660
GNGCPEEESKEASA

SEQ ID NO: 2705 - protein, 14 aa, Homo sapiens
  peptide 2661
WWRGNGCPEEESKE

SEQ ID NO: 2706 - protein, 14 aa, Homo sapiens
  peptide 2662
FAHIEEENFVNELL

SEQ ID NO: 2707 - protein, 14 aa, Homo sapiens
  peptide 2663
FGAHLASFAHIEEE

SEQ ID NO: 2708 - protein, 14 aa, Homo sapiens
  peptide 2664
DEAENAFLLEELFA

SEQ ID NO: 2709 - protein, 14 aa, Homo sapiens
  peptide 2665
STVLDSMSFEAAHE

SEQ ID NO: 2710 - protein, 14 aa, Homo sapiens
  peptide 2666
AKSRREFDEIELAY

SEQ ID NO: 2711 - protein, 14 aa, Homo sapiens
  peptide 2667
ALDFIRRESSVYDI

SEQ ID NO: 2712 - protein, 14 aa, Homo sapiens
  peptide 2668
CEENLFSDYISEVE

SEQ ID NO: 2713 - protein, 14 aa, Homo sapiens
  peptide 2669
DGIAIITTAASDML

SEQ ID NO: 2714 - protein, 14 aa, Homo sapiens
  peptide 2670
DSKIQNQLKKLQSP

SEQ ID NO: 2715 - protein, 14 aa, Homo sapiens
  peptide 2671
EEQEDDHLSIVTLE

SEQ ID NO: 2716 - protein, 14 aa, Homo sapiens
  peptide 2672
ELEEVLLLDMSLDD

SEQ ID NO: 2717 - protein, 14 aa, Homo sapiens
  peptide 2673
EQEDDHLSIVTLEE

SEQ ID NO: 2718 - protein, 14 aa, Homo sapiens
  peptide 2674
ESSMFFQFGPSIEQ

SEQ ID NO: 2719 - protein, 14 aa, Homo sapiens
  peptide 2675
IDILKKISKSVKFT

SEQ ID NO: 2720 - protein, 14 aa, Homo sapiens
  peptide 2676
ILQLFGDGEMEELE

SEQ ID NO: 2721 - protein, 14 aa, Homo sapiens
  peptide 2677
IRSDVSDISTHTVT

SEQ ID NO: 2722 - protein, 14 aa, Homo sapiens
  peptide 2678
KYYVWPRMCPETEE

SEQ ID NO: 2723 - protein, 14 aa, Homo sapiens
  peptide 2679
LFGDGEMEELEALW

SEQ ID NO: 2724 - protein, 14 aa, Homo sapiens
  peptide 2680
LIVSAVAVFVFEYF

SEQ ID NO: 2725 - protein, 14 aa, Homo sapiens
  peptide 2681
NLAAFMIQEEYVDQ

SEQ ID NO: 2726 - protein, 14 aa, Homo sapiens
  peptide 2682
PTGLISVSYDEWDY

SEQ ID NO: 2727 - protein, 14 aa, Homo sapiens
  peptide 2683
QASVMLNIMEEYDW

SEQ ID NO: 2728 - protein, 14 aa, Homo sapiens
  peptide 2684
SAKSRREFDEIELA

SEQ ID NO: 2729 - protein, 14 aa, Homo sapiens
  peptide 2685
SEHSFIPEPKSSCY

SEQ ID NO: 2730 - protein, 14 aa, Homo sapiens
  peptide 2686
SFVGWELEEVLLLD

SEQ ID NO: 2731 - protein, 14 aa, Homo sapiens
  peptide 2687
SGVPAPWEKNLTNV

SEQ ID NO: 2732 - protein, 14 aa, Homo sapiens
  peptide 2688
SPSAFLEPFSADVW

SEQ ID NO: 2733 - protein, 14 aa, Homo sapiens
  peptide 2689
SQKSPPSIGIAVIL

SEQ ID NO: 2734 - protein, 14 aa, Homo sapiens
  peptide 2690
VWPRMCPETEEQED

SEQ ID NO: 2735 - protein, 14 aa, Homo sapiens
  peptide 2691
WEKNLTNVEWEDRS

SEQ ID NO: 2736 - protein, 14 aa, Homo sapiens
  peptide 2692
YNNPPCEENLFSDY

SEQ ID NO: 2737 - protein, 14 aa, Homo sapiens
  peptide 2693
FSPVGYNRCLADGR

SEQ ID NO: 2738 - protein, 14 aa, Homo sapiens
  peptide 2694
IELAYRRRPPRSPD

SEQ ID NO: 2739 - protein, 14 aa, Homo sapiens
  peptide 2695
EETPLFLAEPALPK

SEQ ID NO: 2740 - protein, 14 aa, Homo sapiens
  peptide 2696
ENPNFKRICTGNES

SEQ ID NO: 2741 - protein, 14 aa, Homo sapiens
  peptide 2697
GLRSLYPPPPPPQH

SEQ ID NO: 2742 - protein, 14 aa, Homo sapiens
  peptide 2698
KLQSPEVRSFDDYF

SEQ ID NO: 2743 - protein, 14 aa, Homo sapiens
  peptide 2699
MLDIVKRYNWTYVS

SEQ ID NO: 2744 - protein, 14 aa, Homo sapiens
  peptide 2700
MPILSYPSIKEVYL

SEQ ID NO: 2745 - protein, 14 aa, Homo sapiens
  peptide 2701
PGNGLRSLYPPPPP

SEQ ID NO: 2746 - protein, 14 aa, Homo sapiens
  peptide 2702
STKTLYNVEEEEDA

SEQ ID NO: 2747 - protein, 14 aa, Homo sapiens
  peptide 2703
TACKENEYVQDEFT

SEQ ID NO: 2748 - protein, 14 aa, Homo sapiens
  peptide 2704
VQLTLVVTLIIMEP

SEQ ID NO: 2749 - protein, 14 aa, Homo sapiens
  peptide 2705
NTEEDELEEEEEDL

SEQ ID NO: 2750 - protein, 14 aa, Homo sapiens
  peptide 2706
REGNTEEDELEEEE

SEQ ID NO: 2751 - protein, 14 aa, Homo sapiens
  peptide 2707
TLYNVEEEEDAQPI

SEQ ID NO: 2752 - protein, 14 aa, Homo sapiens
  peptide 2708
CTYYAFKTRNVPAN

SEQ ID NO: 2753 - protein, 14 aa, Homo sapiens
  peptide 2709
DIPQIAYSATSIDL

SEQ ID NO: 2754 - protein, 14 aa, Homo sapiens
  peptide 2710
EDELEEEEEDLQAA

SEQ ID NO: 2755 - protein, 14 aa, Homo sapiens
  peptide 2711
GLSSAMCYSALVTK

SEQ ID NO: 2756 - protein, 14 aa, Homo sapiens
  peptide 2712
RKLRERLPKARVVV

SEQ ID NO: 2757 - protein, 14 aa, Homo sapiens
  peptide 2713
FDTAEVYAAGKAEV

SEQ ID NO: 2758 - protein, 14 aa, Homo sapiens
  peptide 2714
VFANRPDPNTPMEE

SEQ ID NO: 2759 - protein, 14 aa, Homo sapiens
  peptide 2715
GAIQVLPKLSSSII

SEQ ID NO: 2760 - protein, 14 aa, Homo sapiens
  peptide 2716
PKLSSSIIHEIDSI

SEQ ID NO: 2761 - protein, 14 aa, Homo sapiens
  peptide 2717
QVLPKLSSSIIHEI

SEQ ID NO: 2762 - protein, 14 aa, Homo sapiens
  peptide 2718
SSSIIHEIDSILGN

SEQ ID NO: 2763 - protein, 14 aa, Homo sapiens
  peptide 2719
VDVVFANRPDPNTP

SEQ ID NO: 2764 - protein, 14 aa, Homo sapiens
  peptide 2720
ALADACQMEPEEVE

SEQ ID NO: 2765 - protein, 11 aa, Homo sapiens
  peptide 2721
DACQMEPEEVE

SEQ ID NO: 2766 - protein, 14 aa, Homo sapiens
  peptide 2722
DFEDTEVRRSNFDN

SEQ ID NO: 2767 - protein, 11 aa, Homo sapiens
  peptide 2723
DIGFTSVFTVE

SEQ ID NO: 2768 - protein, 11 aa, Homo sapiens
  peptide 2724
DVILSEIDTFL

SEQ ID NO: 2769 - protein, 14 aa, Homo sapiens
  peptide 2725
EASSFFIFSPTNKI

SEQ ID NO: 2770 - protein, 14 aa, Homo sapiens
  peptide 2726
EHFRKFMKRQEEYY

SEQ ID NO: 2771 - protein, 11 aa, Homo sapiens
  peptide 2727
EIEMEEMESPV

SEQ ID NO: 2772 - protein, 11 aa, Homo sapiens
  peptide 2728
EKAVPIPEASS

SEQ ID NO: 2773 - protein, 11 aa, Homo sapiens
  peptide 2729
FAEIEMEEMES

SEQ ID NO: 2774 - protein, 14 aa, Homo sapiens
  peptide 2730
FRCTDLSKMTEEEC

SEQ ID NO: 2775 - protein, 11 aa, Homo sapiens
  peptide 2731
GFTSVFTVEIV

SEQ ID NO: 2776 - protein, 14 aa, Homo sapiens
  peptide 2732
GGLYCLGGGCGNVD

SEQ ID NO: 2777 - protein, 11 aa, Homo sapiens
  peptide 2733
HFRKFMKRQEE

SEQ ID NO: 2778 - protein, 14 aa, Homo sapiens
  peptide 2734
IEMEEMESPVFLED

SEQ ID NO: 2779 - protein, 14 aa, Homo sapiens
  peptide 2735
IILLTIFANCVALA

SEQ ID NO: 2780 - protein, 14 aa, Homo sapiens
  peptide 2736
KDPYPSADFPGDDE

SEQ ID NO: 2781 - protein, 14 aa, Homo sapiens
  peptide 2737
KLLDQVIPPIGDDE

SEQ ID NO: 2782 - protein, 11 aa, Homo sapiens
  peptide 2738
LADACQMEPEE

SEQ ID NO: 2783 - protein, 14 aa, Homo sapiens
  peptide 2739
LDEFKAIWAEYDPE

SEQ ID NO: 2784 - protein, 11 aa, Homo sapiens
  peptide 2740
LQFAEIEMEEM

SEQ ID NO: 2785 - protein, 14 aa, Homo sapiens
  peptide 2741
LRHREWVHSDFHFD

SEQ ID NO: 2786 - protein, 14 aa, Homo sapiens
  peptide 2742
LRKACISIVEWKPF

SEQ ID NO: 2787 - protein, 11 aa, Homo sapiens
  peptide 2743
LSPRPRPLAEL

SEQ ID NO: 2788 - protein, 11 aa, Homo sapiens
  peptide 2744
LYCLGGGCGNV

SEQ ID NO: 2789 - protein, 14 aa, Homo sapiens
  peptide 2745
MSWITQGEVMDVED

SEQ ID NO: 2790 - protein, 14 aa, Homo sapiens
  peptide 2746
NCVALAVYLPMPED

SEQ ID NO: 2791 - protein, 14 aa, Homo sapiens
  peptide 2747
PLQFAEIEMEEMES

SEQ ID NO: 2792 - protein, 11 aa, Homo sapiens
  peptide 2748
QALADACQMEP

SEQ ID NO: 2793 - protein, 11 aa, Homo sapiens
  peptide 2749
QVIPPIGDDEV

SEQ ID NO: 2794 - protein, 11 aa, Homo sapiens
  peptide 2750
RCTDLSKMTEE

SEQ ID NO: 2795 - protein, 11 aa, Homo sapiens
  peptide 2751
RYDFEDTEVRR

SEQ ID NO: 2796 - protein, 11 aa, Homo sapiens
  peptide 2752
SADFPGDDEED

SEQ ID NO: 2797 - protein, 14 aa, Homo sapiens
  peptide 2753
SDYAPGEEYTCGTN

SEQ ID NO: 2798 - protein, 14 aa, Homo sapiens
  peptide 2754
TFEGWPQLLYKAID

SEQ ID NO: 2799 - protein, 11 aa, Homo sapiens
  peptide 2755
VATVENEEPSP

SEQ ID NO: 2800 - protein, 11 aa, Homo sapiens
  peptide 2756
VFSSVHYEREF

SEQ ID NO: 2801 - protein, 11 aa, Homo sapiens
  peptide 2757
VTFQEQGETEY

SEQ ID NO: 2802 - protein, 11 aa, Homo sapiens
  peptide 2758
WPQLLYKAIDS

SEQ ID NO: 2803 - protein, 11 aa, Homo sapiens
  peptide 2759
YAPGEEYTCGT

SEQ ID NO: 2804 - protein, 14 aa, Homo sapiens
  peptide 2760
YCLGGGCGNVDPDE

SEQ ID NO: 2805 - protein, 14 aa, Homo sapiens
  peptide 2761
DPESDYAPGEEYTC

SEQ ID NO: 2806 - protein, 14 aa, Homo sapiens
  peptide 2762
ATVENEEPSPCART

SEQ ID NO: 2807 - protein, 14 aa, Homo sapiens
  peptide 2763
GKFFRCTDLSKMTE

SEQ ID NO: 2808 - protein, 14 aa, Homo sapiens
  peptide 2764
VHYEREFPEETETP

SEQ ID NO: 2809 - protein, 14 aa, Homo sapiens
  peptide 2765
AESLTSAQKEEEEE

SEQ ID NO: 2810 - protein, 11 aa, Homo sapiens
  peptide 2766
AGNATISTVSS

SEQ ID NO: 2811 - protein, 14 aa, Homo sapiens
  peptide 2767
AGYPSTVSTVEGHG

SEQ ID NO: 2812 - protein, 14 aa, Homo sapiens
  peptide 2768
AQDPKFIEVTTQEL

SEQ ID NO: 2813 - protein, 14 aa, Homo sapiens
  peptide 2769
CKGNYITYKDGEVD

SEQ ID NO: 2814 - protein, 11 aa, Homo sapiens
  peptide 2770
CKRLVSMNMPL

SEQ ID NO: 2815 - protein, 11 aa, Homo sapiens
  peptide 2771
CLTLKNPIRRA

SEQ ID NO: 2816 - protein, 11 aa, Homo sapiens
  peptide 2772
CSDSSKQTEAE

SEQ ID NO: 2817 - protein, 14 aa, Homo sapiens
  peptide 2773
CVRARGRPSEEELQ

SEQ ID NO: 2818 - protein, 14 aa, Homo sapiens
  peptide 2774
DMTIEEMESAADNI

SEQ ID NO: 2819 - protein, 11 aa, Homo sapiens
  peptide 2775
EDEEEPEMPVG

SEQ ID NO: 2820 - protein, 11 aa, Homo sapiens
  peptide 2776
EDEGMDEEKPR

SEQ ID NO: 2821 - protein, 11 aa, Homo sapiens
  peptide 2777
ETESVNTENVA

SEQ ID NO: 2822 - protein, 14 aa, Homo sapiens
  peptide 2778
FDIVFTTIFTIEIA

SEQ ID NO: 2823 - protein, 14 aa, Homo sapiens
  peptide 2779
GGPSFPGMLVCIYF

SEQ ID NO: 2824 - protein, 11 aa, Homo sapiens
  peptide 2780
GGSSAARRVRP

SEQ ID NO: 2825 - protein, 11 aa, Homo sapiens
  peptide 2781
GSAGNATISTV

SEQ ID NO: 2826 - protein, 14 aa, Homo sapiens
  peptide 2782
GSIVDIAITEVNPA

SEQ ID NO: 2827 - protein, 14 aa, Homo sapiens
  peptide 2783
GSRGWPPQPVPTLR

SEQ ID NO: 2828 - protein, 14 aa, Homo sapiens
  peptide 2784
HRISKSKFSRYWRR

SEQ ID NO: 2829 - protein, 14 aa, Homo sapiens
  peptide 2785
KLMGSAGNATISTV

SEQ ID NO: 2830 - protein, 14 aa, Homo sapiens
  peptide 2786
LFTVEMILKLIAFK

SEQ ID NO: 2831 - protein, 14 aa, Homo sapiens
  peptide 2787
LTIFANCVALAIYI

SEQ ID NO: 2832 - protein, 11 aa, Homo sapiens
  peptide 2788
LTSAQKEEEEE

SEQ ID NO: 2833 - protein, 14 aa, Homo sapiens
  peptide 2789
MDEEKPRNMSMPTS

SEQ ID NO: 2834 - protein, 14 aa, Homo sapiens
  peptide 2790
MHKTCYNQEGIADV

SEQ ID NO: 2835 - protein, 14 aa, Homo sapiens
  peptide 2791
MVPSQAGAPGRQFH

SEQ ID NO: 2836 - protein, 11 aa, Homo sapiens
  peptide 2792
NYITYKDGEVD

SEQ ID NO: 2837 - protein, 11 aa, Homo sapiens
  peptide 2793
PEDDSNATNSN

SEQ ID NO: 2838 - protein, 11 aa, Homo sapiens
  peptide 2794
PETTGEEDEEE

SEQ ID NO: 2839 - protein, 14 aa, Homo sapiens
  peptide 2795
PHHLDEFKRIWAEY

SEQ ID NO: 2840 - protein, 14 aa, Homo sapiens
  peptide 2796
PLSPAIRVQEVAWK

SEQ ID NO: 2841 - protein, 11 aa, Homo sapiens
  peptide 2797
PVGPRPRPLSE

SEQ ID NO: 2842 - protein, 11 aa, Homo sapiens
  peptide 2798
QKEEEEEKERK

SEQ ID NO: 2843 - protein, 11 aa, Homo sapiens
  peptide 2799
QRKRQQYGKPK

SEQ ID NO: 2844 - protein, 14 aa, Homo sapiens
  peptide 2800
RNMSMPTSETESVN

SEQ ID NO: 2845 - protein, 11 aa, Homo sapiens
  peptide 2801
SAQKEEEEEKE

SEQ ID NO: 2846 - protein, 11 aa, Homo sapiens
  peptide 2802
SITADGESPPA

SEQ ID NO: 2847 - protein, 11 aa, Homo sapiens
  peptide 2803
SKQTEAECKGN

SEQ ID NO: 2848 - protein, 11 aa, Homo sapiens
  peptide 2804
SRGWPPQPVPT

SEQ ID NO: 2849 - protein, 14 aa, Homo sapiens
  peptide 2805
STEMLSYQDDENRQ

SEQ ID NO: 2850 - protein, 11 aa, Homo sapiens
  peptide 2806
STGSNANINNA

SEQ ID NO: 2851 - protein, 11 aa, Homo sapiens
  peptide 2807
STQRKRQQYGK

SEQ ID NO: 2852 - protein, 11 aa, Homo sapiens
  peptide 2808
TADGESPPATK

SEQ ID NO: 2853 - protein, 11 aa, Homo sapiens
  peptide 2809
TFDNFPQSLLT

SEQ ID NO: 2854 - protein, 14 aa, Homo sapiens
  peptide 2810
TFTPSSYSSTGSNA

SEQ ID NO: 2855 - protein, 14 aa, Homo sapiens
  peptide 2811
TGEEDEEEPEMPVG

SEQ ID NO: 2856 - protein, 14 aa, Homo sapiens
  peptide 2812
TIEIALKILGNADY

SEQ ID NO: 2857 - protein, 14 aa, Homo sapiens
  peptide 2813
TIFTNLILFFILLS

SEQ ID NO: 2858 - protein, 11 aa, Homo sapiens
  peptide 2814
TTGEEDEEEPE

SEQ ID NO: 2859 - protein, 14 aa, Homo sapiens
  peptide 2815
VEYLFLIIFTVEAF

SEQ ID NO: 2860 - protein, 11 aa, Homo sapiens
  peptide 2816
VGRDWPWIYFV

SEQ ID NO: 2861 - protein, 14 aa, Homo sapiens
  peptide 2817
VNSTYFEYLMFVLI

SEQ ID NO: 2862 - protein, 14 aa, Homo sapiens
  peptide 2818
VSLMVPSQAGAPGR

SEQ ID NO: 2863 - protein, 14 aa, Homo sapiens
  peptide 2819
WDGPKHGITNFDNF

SEQ ID NO: 2864 - protein, 11 aa, Homo sapiens
  peptide 2820
YFEYLMFVLIL

SEQ ID NO: 2865 - protein, 11 aa, Homo sapiens
  peptide 2821
YFSDPWNVFDF

SEQ ID NO: 2866 - protein, 14 aa, Homo sapiens
  peptide 2822
YKVWYVVNSTYFEY

SEQ ID NO: 2867 - protein, 11 aa, Homo sapiens
  peptide 2823
YLFLIIFTVEA

SEQ ID NO: 2868 - protein, 14 aa, Homo sapiens
  peptide 2824
YPNPETTGEEDEEE

SEQ ID NO: 2869 - protein, 11 aa, Homo sapiens
  peptide 2825
YTCSDSSKQTE

SEQ ID NO: 2870 - protein, 14 aa, Homo sapiens
  peptide 2826
TESVNTENVAGGDI

SEQ ID NO: 2871 - protein, 14 aa, Homo sapiens
  peptide 2827
TSETESVNTENVAG

SEQ ID NO: 2872 - protein, 14 aa, Homo sapiens
  peptide 2828
DDSNATNSNLERVE

SEQ ID NO: 2873 - protein, 14 aa, Homo sapiens
  peptide 2829
APGEPCPLAQEEVI

SEQ ID NO: 2874 - protein, 14 aa, Homo sapiens
  peptide 2830
ASPIPGAPPENITN

SEQ ID NO: 2875 - protein, 14 aa, Homo sapiens
  peptide 2831
CKPDPPPPPPPHPH

SEQ ID NO: 2876 - protein, 14 aa, Homo sapiens
  peptide 2832
DGGLDDEAGAGGGG

SEQ ID NO: 2877 - protein, 14 aa, Homo sapiens
  peptide 2833
DVCGPLFEEELGFW

SEQ ID NO: 2878 - protein, 14 aa, Homo sapiens
  peptide 2834
LCFQDAGGGAGGPP

SEQ ID NO: 2879 - protein, 14 aa, Homo sapiens
  peptide 2835
LDDEAGAGGGGLDG

SEQ ID NO: 2880 - protein, 14 aa, Homo sapiens
  peptide 2836
LKRLCFQDAGGGAG

SEQ ID NO: 2881 - protein, 14 aa, Homo sapiens
  peptide 2837
PDDILGSNHTYFKN

SEQ ID NO: 2882 - protein, 14 aa, Homo sapiens
  peptide 2838
PPPQPPESPPPPPL

SEQ ID NO: 2883 - protein, 14 aa, Homo sapiens
  peptide 2839
RGRQGASKQQPAPP

SEQ ID NO: 2884 - protein, 14 aa, Homo sapiens
  peptide 2840
SNHTYFKNIPIGFW

SEQ ID NO: 2885 - protein, 14 aa, Homo sapiens
  peptide 2841
APPENITNVEVETE

SEQ ID NO: 2886 - protein, 14 aa, Homo sapiens
  peptide 2842
DAEEALDSFEAPDP

SEQ ID NO: 2887 - protein, 14 aa, Homo sapiens
  peptide 2843
RFDYDPGADEFFFD

SEQ ID NO: 2888 - protein, 14 aa, Homo sapiens
  peptide 2844
YYAERIGADPDDIL

SEQ ID NO: 2889 - protein, 14 aa, Homo sapiens
  peptide 2845
FDAPFRPADTHNEV

SEQ ID NO: 2890 - protein, 14 aa, Homo sapiens
  peptide 2846
GPAKKVLTLEGDLV

SEQ ID NO: 2891 - protein, 14 aa, Homo sapiens
  peptide 2847
DSLLEVCDDYSLDD

SEQ ID NO: 2892 - protein, 14 aa, Homo sapiens
  peptide 2848
DYWGIDEIYLESCC

SEQ ID NO: 2893 - protein, 14 aa, Homo sapiens
  peptide 2849
EAETLREREGEEFD

SEQ ID NO: 2894 - protein, 14 aa, Homo sapiens
  peptide 2850
ELGLLILFLAMGIM

SEQ ID NO: 2895 - protein, 14 aa, Homo sapiens
  peptide 2851
EMCALSFSQELDYW

SEQ ID NO: 2896 - protein, 14 aa, Homo sapiens
  peptide 2852
EPMEIVRSKACSRR

SEQ ID NO: 2897 - protein, 14 aa, Homo sapiens
  peptide 2853
KGPSGQEKCKLENH

SEQ ID NO: 2898 - protein, 14 aa, Homo sapiens
  peptide 2854
MNMKDAFARSIEMM

SEQ ID NO: 2899 - protein, 14 aa, Homo sapiens
  peptide 2855
RDCNTHDSLLEVCD

SEQ ID NO: 2900 - protein, 14 aa, Homo sapiens
  peptide 2856
RLNVGGLAHEVLWR

SEQ ID NO: 2901 - protein, 14 aa, Homo sapiens
  peptide 2857
SAAQSKPKEELEME

SEQ ID NO: 2902 - protein, 14 aa, Homo sapiens
  peptide 2858
SFWWATITMTTVGY

SEQ ID NO: 2903 - protein, 14 aa, Homo sapiens
  peptide 2859
SGQEKCKLENHISP

SEQ ID NO: 2904 - protein, 14 aa, Homo sapiens
  peptide 2860
TSSLPPEPMEIVRS

SEQ ID NO: 2905 - protein, 14 aa, Homo sapiens
  peptide 2861
VEAVCIAWFTMEYL

SEQ ID NO: 2906 - protein, 14 aa, Homo sapiens
  peptide 2862
YSLDDNEYFFDRHP

SEQ ID NO: 2907 - protein, 14 aa, Homo sapiens
  peptide 2863
CDDYSLDDNEYFFD

SEQ ID NO: 2908 - protein, 14 aa, Homo sapiens
  peptide 2864
LEVCDDYSLDDNEY

SEQ ID NO: 2909 - protein, 14 aa, Homo sapiens
  peptide 2865
DVVFANRPDSNTPM

SEQ ID NO: 2910 - protein, 14 aa, Homo sapiens
  peptide 2866
KMTSHVVNEIDNIL

SEQ ID NO: 2911 - protein, 14 aa, Homo sapiens
  peptide 2867
VLPKMTSHVVNEID

SEQ ID NO: 2912 - protein, 14 aa, Homo sapiens
  peptide 2868
FANRPDSNTPMEEI

SEQ ID NO: 2913 - protein, 14 aa, Homo sapiens
  peptide 2869
PCCWTCEPCDGYQY

SEQ ID NO: 2914 - protein, 14 aa, Homo sapiens
  peptide 2870
PELNVQKRKRSFKA

SEQ ID NO: 2915 - protein, 14 aa, Homo sapiens
  peptide 2871
CWICIPCEPYEYLA

SEQ ID NO: 2916 - protein, 14 aa, Homo sapiens
  peptide 2872
FGDGMGRYNVFNFQ

SEQ ID NO: 2917 - protein, 14 aa, Homo sapiens
  peptide 2873
AALVRRAPQPPGRP

SEQ ID NO: 2918 - protein, 14 aa, Homo sapiens
  peptide 2874
APVFVAYCSREEAE

SEQ ID NO: 2919 - protein, 14 aa, Homo sapiens
  peptide 2875
CLTVVAITVFMFEY

SEQ ID NO: 2920 - protein, 14 aa, Homo sapiens
  peptide 2876
DMVTTAGVSSSLDR

SEQ ID NO: 2921 - protein, 14 aa, Homo sapiens
  peptide 2877
FMIQEQYIDTVSGL

SEQ ID NO: 2922 - protein, 14 aa, Homo sapiens
  peptide 2878
IQPLTVGVNTTNPS

SEQ ID NO: 2923 - protein, 14 aa, Homo sapiens
  peptide 2879
KLRHSVPNSSQLDF

SEQ ID NO: 2924 - protein, 14 aa, Homo sapiens
  peptide 2880
LTVGVNTTNPSSLL

SEQ ID NO: 2925 - protein, 14 aa, Homo sapiens
  peptide 2881
NEKNEVMSSKLDID

SEQ ID NO: 2926 - protein, 14 aa, Homo sapiens
  peptide 2882
PAPAGDCRVHPGPV

SEQ ID NO: 2927 - protein, 14 aa, Homo sapiens
  peptide 2883
PEPSPTGWGPPDGG

SEQ ID NO: 2928 - protein, 14 aa, Homo sapiens
  peptide 2884
QLQVLFKVLEEYDW

SEQ ID NO: 2929 - protein, 14 aa, Homo sapiens
  peptide 2885
RLLDVVTLELGPGG

SEQ ID NO: 2930 - protein, 14 aa, Homo sapiens
  peptide 2886
RPFLPLFPELEDLP

SEQ ID NO: 2931 - protein, 14 aa, Homo sapiens
  peptide 2887
RSGRPFLPLFPELE

SEQ ID NO: 2932 - protein, 14 aa, Homo sapiens
  peptide 2888
SQTHVPILSISGGS

SEQ ID NO: 2933 - protein, 14 aa, Homo sapiens
  peptide 2889
SVVTESWRLSLRQK

SEQ ID NO: 2934 - protein, 14 aa, Homo sapiens
  peptide 2890
VKFNQRSVEDALTS

SEQ ID NO: 2935 - protein, 14 aa, Homo sapiens
  peptide 2891
ATFPVGLISVVTES

SEQ ID NO: 2936 - protein, 14 aa, Homo sapiens
  peptide 2892
FLGDGETQKLETVW

SEQ ID NO: 2937 - protein, 14 aa, Homo sapiens
  peptide 2893
QPLTVGVNTTNPSS

SEQ ID NO: 2938 - protein, 14 aa, Homo sapiens
  peptide 2894
VWLSGICQNEKNEV

SEQ ID NO: 2939 - protein, 14 aa, Homo sapiens
  peptide 2895
AEEREVVVEEEDRW

SEQ ID NO: 2940 - protein, 14 aa, Homo sapiens
  peptide 2896
AKIDLEQMEQTVDL

SEQ ID NO: 2941 - protein, 11 aa, Homo sapiens
  peptide 2897
ALLQEGELLLS

SEQ ID NO: 2942 - protein, 14 aa, Homo sapiens
  peptide 2898
ASGPKAEALLQEGE

SEQ ID NO: 2943 - protein, 11 aa, Homo sapiens
  peptide 2899
CKMKFGSWTYD

SEQ ID NO: 2944 - protein, 11 aa, Homo sapiens
  peptide 2900
FRGYNRWARPV

SEQ ID NO: 2945 - protein, 11 aa, Homo sapiens
  peptide 2901
IDLEQMEQTVD

SEQ ID NO: 2946 - protein, 14 aa, Homo sapiens
  peptide 2902
LESNVDAEEREVVV

SEQ ID NO: 2947 - protein, 11 aa, Homo sapiens
  peptide 2903
LMNRPPPPVEL

SEQ ID NO: 2948 - protein, 11 aa, Homo sapiens
  peptide 2904
NVDAEEREVVV

SEQ ID NO: 2949 - protein, 14 aa, Homo sapiens
  peptide 2905
NVDAEEREVVVEEE

SEQ ID NO: 2950 - protein, 11 aa, Homo sapiens
  peptide 2906
REVVVEEEDRW

SEQ ID NO: 2951 - protein, 11 aa, Homo sapiens
  peptide 2907
RWNPTDFGNIT

SEQ ID NO: 2952 - protein, 14 aa, Homo sapiens
  peptide 2908
WLLMNRPPPPVELC

SEQ ID NO: 2953 - protein, 7 aa, Homo sapiens
  peptide 2909
AEALLQE

SEQ ID NO: 2954 - protein, 7 aa, Homo sapiens
  peptide 2910
ALLQEGE

SEQ ID NO: 2955 - protein, 13 aa, Homo sapiens
  peptide 2911
ALLQEGELLLSPH

SEQ ID NO: 2956 - protein, 13 aa, Homo sapiens
  peptide 2912
GASGPKAEALLQE

SEQ ID NO: 2957 - protein, 13 aa, Homo sapiens
  peptide 2913
VPPAIYKSSCSID

SEQ ID NO: 2958 - protein, 11 aa, Homo sapiens
  peptide 2914
CEEIYTDITYS

SEQ ID NO: 2959 - protein, 11 aa, Homo sapiens
  peptide 2915
CFHCHKSNELA

SEQ ID NO: 2960 - protein, 11 aa, Homo sapiens
  peptide 2916
DGIETLRVPAD

SEQ ID NO: 2961 - protein, 11 aa, Homo sapiens
  peptide 2917
DLLIIGSKVDM

SEQ ID NO: 2962 - protein, 11 aa, Homo sapiens
  peptide 2918
EIDLLIIGSKV

SEQ ID NO: 2963 - protein, 11 aa, Homo sapiens
  peptide 2919
ITQLANVDEVN

SEQ ID NO: 2964 - protein, 14 aa, Homo sapiens
  peptide 2920
ITQLANVDEVNQIM

SEQ ID NO: 2965 - protein, 14 aa, Homo sapiens
  peptide 2921
LANVDEVNQIMETN

SEQ ID NO: 2966 - protein, 11 aa, Homo sapiens
  peptide 2922
LRWDPMEYDGI

SEQ ID NO: 2967 - protein, 11 aa, Homo sapiens
  peptide 2923
NLWLRHIWNDY

SEQ ID NO: 2968 - protein, 14 aa, Homo sapiens
  peptide 2924
PAIFKSSCPMDITF

SEQ ID NO: 2969 - protein, 11 aa, Homo sapiens
  peptide 2925
SEHSPEVEDVI

SEQ ID NO: 2970 - protein, 11 aa, Homo sapiens
  peptide 2926
TLSIVVTVFVL

SEQ ID NO: 2971 - protein, 14 aa, Homo sapiens
  peptide 2927
VHFEVAITQLANVD

SEQ ID NO: 2972 - protein, 14 aa, Homo sapiens
  peptide 2928
WTPPAIFKSSCPMD

SEQ ID NO: 2973 - protein, 11 aa, Homo sapiens
  peptide 2929
YDKAEIDLLII

SEQ ID NO: 2974 - protein, 11 aa, Homo sapiens
  peptide 2930
YKLRWDPMEYD

SEQ ID NO: 2975 - protein, 13 aa, Homo sapiens
  peptide 2931
DMNDFWENSEWEI

SEQ ID NO: 2976 - protein, 7 aa, Homo sapiens
  peptide 2932
ENVSDPV

SEQ ID NO: 2977 - protein, 13 aa, Homo sapiens
  peptide 2933
EVAITQLANVDEV

SEQ ID NO: 2978 - protein, 7 aa, Homo sapiens
  peptide 2934
LANVDEV

SEQ ID NO: 2979 - protein, 13 aa, Homo sapiens
  peptide 2935
NLIIPCLFISFLT

SEQ ID NO: 2980 - protein, 13 aa, Homo sapiens
  peptide 2936
QFIRPVENVSDPV

SEQ ID NO: 2981 - protein, 13 aa, Homo sapiens
  peptide 2937
VAITQLANVDEVN

SEQ ID NO: 2982 - protein, 7 aa, Homo sapiens
  peptide 2938
VQFIAEN

SEQ ID NO: 2983 - protein, 11 aa, Homo sapiens
  peptide 2939
AAVATSLGRSN

SEQ ID NO: 2984 - protein, 11 aa, Homo sapiens
  peptide 2940
ACFMNNSGILE

SEQ ID NO: 2985 - protein, 14 aa, Homo sapiens
  peptide 2941
ADDGQFQERQSLEP

SEQ ID NO: 2986 - protein, 11 aa, Homo sapiens
  peptide 2942
AEIREDEEEVE

SEQ ID NO: 2987 - protein, 14 aa, Homo sapiens
  peptide 2943
AKEPTIQEERAQDL

SEQ ID NO: 2988 - protein, 11 aa, Homo sapiens
  peptide 2944
AKEVSPMSAPN

SEQ ID NO: 2989 - protein, 14 aa, Homo sapiens
  peptide 2945
ALEQHLPEDDKTPM

SEQ ID NO: 2990 - protein, 11 aa, Homo sapiens
  peptide 2946
ALEVLRRATIK

SEQ ID NO: 2991 - protein, 11 aa, Homo sapiens
  peptide 2947
APNMPSIERDR

SEQ ID NO: 2992 - protein, 11 aa, Homo sapiens
  peptide 2948
CEPDTTAPSGQ

SEQ ID NO: 2993 - protein, 11 aa, Homo sapiens
  peptide 2949
DEFVRVWAEYD

SEQ ID NO: 2994 - protein, 11 aa, Homo sapiens
  peptide 2950
DSHASDCGEEE

SEQ ID NO: 2995 - protein, 11 aa, Homo sapiens
  peptide 2951
EDEEEVEKKKQ

SEQ ID NO: 2996 - protein, 11 aa, Homo sapiens
  peptide 2952
EPYLALHEDSH

SEQ ID NO: 2997 - protein, 11 aa, Homo sapiens
  peptide 2953
EQGDKMMEECS

SEQ ID NO: 2998 - protein, 11 aa, Homo sapiens
  peptide 2954
FMNNSGILEGF

SEQ ID NO: 2999 - protein, 11 aa, Homo sapiens
  peptide 2955
FRDLWNILDFV

SEQ ID NO: 3000 - protein, 11 aa, Homo sapiens
  peptide 2956
FRPGTSFGISV

SEQ ID NO: 3001 - protein, 11 aa, Homo sapiens
  peptide 2957
GDKMMEECSLE

SEQ ID NO: 3002 - protein, 14 aa, Homo sapiens
  peptide 2958
GDSDQSRNRQGTPV

SEQ ID NO: 3003 - protein, 11 aa, Homo sapiens
  peptide 2959
GQFQERQSLEP

SEQ ID NO: 3004 - protein, 14 aa, Homo sapiens
  peptide 2960
GWPQVLQHSVDVTE

SEQ ID NO: 3005 - protein, 11 aa, Homo sapiens
  peptide 2961
HGAKEPTIQEE

SEQ ID NO: 3006 - protein, 14 aa, Homo sapiens
  peptide 2962
HHLDEFVRVWAEYD

SEQ ID NO: 3007 - protein, 11 aa, Homo sapiens
  peptide 2963
HNQPQWLTHLL

SEQ ID NO: 3008 - protein, 14 aa, Homo sapiens
  peptide 2964
IAASSIALAAEDPV

SEQ ID NO: 3009 - protein, 11 aa, Homo sapiens
  peptide 2965
KDEQEEEEAFN

SEQ ID NO: 3010 - protein, 11 aa, Homo sapiens
  peptide 2966
KEAEIREDEEE

SEQ ID NO: 3011 - protein, 14 aa, Homo sapiens
  peptide 2967
KEAEIREDEEEVEK

SEQ ID NO: 3012 - protein, 11 aa, Homo sapiens
  peptide 2968
KRLVLMNMPVA

SEQ ID NO: 3013 - protein, 14 aa, Homo sapiens
  peptide 2969
KVAYKRLVLMNMPV

SEQ ID NO: 3014 - protein, 11 aa, Homo sapiens
  peptide 2970
KVKKQRQQLEE

SEQ ID NO: 3015 - protein, 11 aa, Homo sapiens
  peptide 2971
LGATWNWLYFI

SEQ ID NO: 3016 - protein, 11 aa, Homo sapiens
  peptide 2972
LGLALEKFEEE

SEQ ID NO: 3017 - protein, 11 aa, Homo sapiens
  peptide 2973
LPYLQQDPVSG

SEQ ID NO: 3018 - protein, 11 aa, Homo sapiens
  peptide 2974
LVLMNMPVAED

SEQ ID NO: 3019 - protein, 11 aa, Homo sapiens
  peptide 2975
MSFLKLFRAAR

SEQ ID NO: 3020 - protein, 14 aa, Homo sapiens
  peptide 2976
PNGHYRRRRRGGPG

SEQ ID NO: 3021 - protein, 11 aa, Homo sapiens
  peptide 2977
PPLRHSWQMPN

SEQ ID NO: 3022 - protein, 11 aa, Homo sapiens
  peptide 2978
PSLYRRPRAIE

SEQ ID NO: 3023 - protein, 11 aa, Homo sapiens
  peptide 2979
QPQWLTHLLYY

SEQ ID NO: 3024 - protein, 11 aa, Homo sapiens
  peptide 2980
QSRSPSEGRSQ

SEQ ID NO: 3025 - protein, 11 aa, Homo sapiens
  peptide 2981
QWLTHLLYYAE

SEQ ID NO: 3026 - protein, 11 aa, Homo sapiens
  peptide 2982
RSPSEGRSQTP

SEQ ID NO: 3027 - protein, 11 aa, Homo sapiens
  peptide 2983
SPMSAPNMPSI

SEQ ID NO: 3028 - protein, 11 aa, Homo sapiens
  peptide 2984
SPPLGLGKRCP

SEQ ID NO: 3029 - protein, 14 aa, Homo sapiens
  peptide 2985
TTESTSVTVAIPDV

SEQ ID NO: 3030 - protein, 11 aa, Homo sapiens
  peptide 2986
VHHNQPQWLTH

SEQ ID NO: 3031 - protein, 11 aa, Homo sapiens
  peptide 2987
VLTEQEPEGSS

SEQ ID NO: 3032 - protein, 11 aa, Homo sapiens
  peptide 2988
VQPSNHGIYLP

SEQ ID NO: 3033 - protein, 11 aa, Homo sapiens
  peptide 2989
WHFVVSPSFEY

SEQ ID NO: 3034 - protein, 14 aa, Homo sapiens
  peptide 2990
YKRLVLMNMPVAED

SEQ ID NO: 3035 - protein, 14 aa, Homo sapiens
  peptide 2991
EQKNAPMFQRMEPS

SEQ ID NO: 3036 - protein, 14 aa, Homo sapiens
  peptide 2992
AIPDVDPLVDSTVV

SEQ ID NO: 3037 - protein, 14 aa, Homo sapiens
  peptide 2993
HRQSQRRSRHRRVR

SEQ ID NO: 3038 - protein, 14 aa, Homo sapiens
  peptide 2994
IFDFITVIGSITEI

SEQ ID NO: 3039 - protein, 14 aa, Homo sapiens
  peptide 2995
LAEENKNAGTSALE

SEQ ID NO: 3040 - protein, 14 aa, Homo sapiens
  peptide 2996
QALESNNACLTESS

SEQ ID NO: 3041 - protein, 14 aa, Homo sapiens
  peptide 2997
RARHRQSQRRSRHR

SEQ ID NO: 3042 - protein, 14 aa, Homo sapiens
  peptide 2998
TEQEPEGSSEQALL

SEQ ID NO: 3043 - protein, 14 aa, Homo sapiens
  peptide 2999
ADCPMRLVNFPMDG

SEQ ID NO: 3044 - protein, 14 aa, Homo sapiens
  peptide 3000
AGFNLVYWVVYLSK

SEQ ID NO: 3045 - protein, 14 aa, Homo sapiens
  peptide 3001
IKSNTGEYVIMTVY

SEQ ID NO: 3046 - protein, 14 aa, Homo sapiens
  peptide 3002
WLCIILWLENALGK

SEQ ID NO: 3047 - protein, 14 aa, Homo sapiens
  peptide 3003
RAPILQSTPVTPPP

SEQ ID NO: 3048 - protein, 14 aa, Homo sapiens
  peptide 3004
IFFEALNYETIEQK

SEQ ID NO: 3049 - protein, 14 aa, Homo sapiens
  peptide 3005
TIEQKKAYEVAALL

SEQ ID NO: 3050 - protein, 14 aa, Homo sapiens
  peptide 3006
TISHTVNVPLQTTL

SEQ ID NO: 3051 - protein, 14 aa, Homo sapiens
  peptide 3007
DSTTYAHFLFNAFD

SEQ ID NO: 3052 - protein, 14 aa, Homo sapiens
  peptide 3008
YAQNSTKRSIKERL

SEQ ID NO: 3053 - protein, 14 aa, Homo sapiens
  peptide 3009
ISSKVPKAEYIPTI

SEQ ID NO: 3054 - protein, 14 aa, Homo sapiens
  peptide 3010
SLVSNGCYEGSLSE

SEQ ID NO: 3055 - protein, 12 aa, Homo sapiens
  peptide 3011
AGYWNEYERFVP

SEQ ID NO: 3056 - protein, 14 aa, Homo sapiens
  peptide 3012
FSPYEWHLEDNNEE

SEQ ID NO: 3057 - protein, 14 aa, Homo sapiens
  peptide 3013
YEWHLEDNNEEPRD

SEQ ID NO: 3058 - protein, 14 aa, Homo sapiens
  peptide 3014
NYNSVDLSEVEWED

SEQ ID NO: 3059 - protein, 11 aa, Homo sapiens
  peptide 3015
AHGLLDPYNAF

SEQ ID NO: 3060 - protein, 14 aa, Homo sapiens
  peptide 3016
DQGPVLMTTVAMPV

SEQ ID NO: 3061 - protein, 14 aa, Homo sapiens
  peptide 3017
DTLGDDDFFNIIAY

SEQ ID NO: 3062 - protein, 11 aa, Homo sapiens
  peptide 3018
DVLRNAMVNRK

SEQ ID NO: 3063 - protein, 11 aa, Homo sapiens
  peptide 3019
EFDADLQYEYF

SEQ ID NO: 3064 - protein, 14 aa, Homo sapiens
  peptide 3020
EPDENGVIAFDCRN

SEQ ID NO: 3065 - protein, 11 aa, Homo sapiens
  peptide 3021
FFNIIAYNEEL

SEQ ID NO: 3066 - protein, 11 aa, Homo sapiens
  peptide 3022
FRGNVTIEEGL

SEQ ID NO: 3067 - protein, 14 aa, Homo sapiens
  peptide 3023
GDDDFFNIIAYNEE

SEQ ID NO: 3068 - protein, 14 aa, Homo sapiens
  peptide 3024
GSFVYSIPFSTGPV

SEQ ID NO: 3069 - protein, 11 aa, Homo sapiens
  peptide 3025
IMLITDGAVDT

SEQ ID NO: 3070 - protein, 11 aa, Homo sapiens
  peptide 3026
KEYEKDVAIEE

SEQ ID NO: 3071 - protein, 14 aa, Homo sapiens
  peptide 3027
KEYEKDVAIEEIDG

SEQ ID NO: 3072 - protein, 11 aa, Homo sapiens
  peptide 3028
LALNKSENSDK

SEQ ID NO: 3073 - protein, 14 aa, Homo sapiens
  peptide 3029
LPQAQKLTDDQGPV

SEQ ID NO: 3074 - protein, 11 aa, Homo sapiens
  peptide 3030
LRNAMVNRKTG

SEQ ID NO: 3075 - protein, 14 aa, Homo sapiens
  peptide 3031
LVDVSGSMKGLRLT

SEQ ID NO: 3076 - protein, 11 aa, Homo sapiens
  peptide 3032
NERDKDGNFLE

SEQ ID NO: 3077 - protein, 14 aa, Homo sapiens
  peptide 3033
NIIAYNEELHYVEP

SEQ ID NO: 3078 - protein, 11 aa, Homo sapiens
  peptide 3034
NNLPVNISLSD

SEQ ID NO: 3079 - protein, 11 aa, Homo sapiens
  peptide 3035
NYSSVDLSEVE

SEQ ID NO: 3080 - protein, 11 aa, Homo sapiens
  peptide 3036
PVLMTTVAMPV

SEQ ID NO: 3081 - protein, 14 aa, Homo sapiens
  peptide 3037
QLVKKLAKNMEEMF

SEQ ID NO: 3082 - protein, 11 aa, Homo sapiens
  peptide 3038
QYPGIKWEPDE

SEQ ID NO: 3083 - protein, 14 aa, Homo sapiens
  peptide 3039
SILDTLGDDDFFNI

SEQ ID NO: 3084 - protein, 14 aa, Homo sapiens
  peptide 3040
SQAIMLITDGAVDT

SEQ ID NO: 3085 - protein, 11 aa, Homo sapiens
  peptide 3041
THPELRLLYEE

SEQ ID NO: 3086 - protein, 11 aa, Homo sapiens
  peptide 3042
TSLALNKSENS

SEQ ID NO: 3087 - protein, 14 aa, Homo sapiens
  peptide 3043
TVSSILDTLGDDDF

SEQ ID NO: 3088 - protein, 14 aa, Homo sapiens
  peptide 3044
VIDQEHDVVWTEAY

SEQ ID NO: 3089 - protein, 11 aa, Homo sapiens
  peptide 3045
VSEDYTQTGDF

SEQ ID NO: 3090 - protein, 14 aa, Homo sapiens
  peptide 3046
YWTSLALNKSENSD

SEQ ID NO: 3091 - protein, 14 aa, Homo sapiens
  peptide 3047
EAYWTSLALNKSEN

SEQ ID NO: 3092 - protein, 14 aa, Homo sapiens
  peptide 3048
LALNKSENSDKGVE

SEQ ID NO: 3093 - protein, 14 aa, Homo sapiens
  peptide 3049
WTSLALNKSENSDK

SEQ ID NO: 3094 - protein, 14 aa, Homo sapiens
  peptide 3050
AECYLQLHNFPMDE

SEQ ID NO: 3095 - protein, 14 aa, Homo sapiens
  peptide 3051
GNCVDKADDEDDED

SEQ ID NO: 3096 - protein, 14 aa, Homo sapiens
  peptide 3052
LHLGNCVDKADDED

SEQ ID NO: 3097 - protein, 14 aa, Homo sapiens
  peptide 3053
TISGDYVIMTIFFD

SEQ ID NO: 3098 - protein, 14 aa, Homo sapiens
  peptide 3054
YLQLHNFPMDEHSC

SEQ ID NO: 3099 - protein, 14 aa, Homo sapiens
  peptide 3055
VDKADDEDDEDLTV

SEQ ID NO: 3100 - protein, 14 aa, Homo sapiens
  peptide 3056
CASTLPDWRNAAAD

SEQ ID NO: 3101 - protein, 14 aa, Homo sapiens
  peptide 3057
LEVCDDYDRERNEY

SEQ ID NO: 3102 - protein, 14 aa, Homo sapiens
  peptide 3058
RDVLEVCDDYDRER

SEQ ID NO: 3103 - protein, 14 aa, Homo sapiens
  peptide 3059
RMRRTFEEPTSSLA

SEQ ID NO: 3104 - protein, 14 aa, Homo sapiens
  peptide 3060
RSERDVLEVCDDYD

SEQ ID NO: 3105 - protein, 14 aa, Homo sapiens
  peptide 3061
CDDYDRERNEYFFD

SEQ ID NO: 3106 - protein, 14 aa, Homo sapiens
  peptide 3062
SARYSRSLSTEFLN

SEQ ID NO: 3107 - protein, 14 aa, Homo sapiens
  peptide 3063
IFEITTQFGVMPPE

SEQ ID NO: 3108 - protein, 14 aa, Homo sapiens
  peptide 3064
IPLPPRRRELPALR

SEQ ID NO: 3109 - protein, 14 aa, Homo sapiens
  peptide 3065
LDAFIMDKALLDYE

SEQ ID NO: 3110 - protein, 14 aa, Homo sapiens
  peptide 3066
NNFFIWNLQHDPMG

SEQ ID NO: 3111 - protein, 14 aa, Homo sapiens
  peptide 3067
PFVFTREVDDEGLC

SEQ ID NO: 3112 - protein, 14 aa, Homo sapiens
  peptide 3068
QELQLAVSRKTELE

SEQ ID NO: 3113 - protein, 14 aa, Homo sapiens
  peptide 3069
QLGIRIHQDIPLPP

SEQ ID NO: 3114 - protein, 14 aa, Homo sapiens
  peptide 3070
RSQVIDFTSPFFST

SEQ ID NO: 3115 - protein, 14 aa, Homo sapiens
  peptide 3071
RWVLGDSQNVEELR

SEQ ID NO: 3116 - protein, 14 aa, Homo sapiens
  peptide 3072
TMNCMEVETTNLTS

SEQ ID NO: 3117 - protein, 14 aa, Homo sapiens
  peptide 3073
TNGKADSLNVSRNS

SEQ ID NO: 3118 - protein, 14 aa, Homo sapiens
  peptide 3074
ADSLNVSRNSVMQE

SEQ ID NO: 3119 - protein, 14 aa, Homo sapiens
  peptide 3075
NGKADSLNVSRNSV

SEQ ID NO: 3120 - protein, 14 aa, Homo sapiens
  peptide 3076
DIDPEIETECFFVE

SEQ ID NO: 3121 - protein, 14 aa, Homo sapiens
  peptide 3077
ECLFSLINGDDMFA

SEQ ID NO: 3122 - protein, 14 aa, Homo sapiens
  peptide 3078
CDDYDEDSQEFFFD

SEQ ID NO: 3123 - protein, 14 aa, Homo sapiens
  peptide 3079
EEIVQLCDDYDEDS

SEQ ID NO: 3124 - protein, 14 aa, Homo sapiens
  peptide 3080
DLRRFARSALNLVD

SEQ ID NO: 3125 - protein, 14 aa, Homo sapiens
  peptide 3081
EEDEDGEEEDQWKD

SEQ ID NO: 3126 - protein, 14 aa, Homo sapiens
  peptide 3082
KDDLAEEDQQAGEV

SEQ ID NO: 3127 - protein, 14 aa, Homo sapiens
  peptide 3083
RRSWSYRPWNTTEN

SEQ ID NO: 3128 - protein, 14 aa, Homo sapiens
  peptide 3084
AAGGAGGGGGGGGG

SEQ ID NO: 3129 - protein, 11 aa, Homo sapiens
  peptide 3085
AGLAGAGGGGG

SEQ ID NO: 3130 - protein, 11 aa, Homo sapiens
  peptide 3086
DTDYDHDSAEY

SEQ ID NO: 3131 - protein, 14 aa, Homo sapiens
  peptide 3087
FGGAAGGAGGGGGG

SEQ ID NO: 3132 - protein, 11 aa, Homo sapiens
  peptide 3088
GAGGGGGGAVG

SEQ ID NO: 3133 - protein, 14 aa, Homo sapiens
  peptide 3089
GAGGGGGGGGGAGA

SEQ ID NO: 3134 - protein, 11 aa, Homo sapiens
  peptide 3090
GGGGGAGAERD

SEQ ID NO: 3135 - protein, 14 aa, Homo sapiens
  peptide 3091
GGGGGGGGAGAERD

SEQ ID NO: 3136 - protein, 11 aa, Homo sapiens
  peptide 3092
HFPEDTDYDHD

SEQ ID NO: 3137 - protein, 11 aa, Homo sapiens
  peptide 3093
INHFPEDTDYD

SEQ ID NO: 3138 - protein, 14 aa, Homo sapiens
  peptide 3094
LYTRALICNTTNLT

SEQ ID NO: 3139 - protein, 14 aa, Homo sapiens
  peptide 3095
NHFPEDTDYDHDSA

SEQ ID NO: 3140 - protein, 11 aa, Homo sapiens
  peptide 3096
PSYRFRYRRRS

SEQ ID NO: 3141 - protein, 11 aa, Homo sapiens
  peptide 3097
RALICNTTNLT

SEQ ID NO: 3142 - protein, 11 aa, Homo sapiens
  peptide 3098
RGVCVKINHFP

SEQ ID NO: 3143 - protein, 11 aa, Homo sapiens
  peptide 3099
RLPSYRFRYRR

SEQ ID NO: 3144 - protein, 11 aa, Homo sapiens
  peptide 3100
SDLLKAGGGAG

SEQ ID NO: 3145 - protein, 11 aa, Homo sapiens
  peptide 3101
VTVTVTGPPAP

SEQ ID NO: 3146 - protein, 11 aa, Homo sapiens
  peptide 3102
YRFRYRRRSRS

SEQ ID NO: 3147 - protein, 11 aa, Homo sapiens
  peptide 3103
YTRALICNTTN

SEQ ID NO: 3148 - protein, 14 aa, Homo sapiens
  peptide 3104
AILRLPSYRFRYRR

SEQ ID NO: 3149 - protein, 14 aa, Homo sapiens
  peptide 3105
EPGPKRDEEKKNHY

SEQ ID NO: 3150 - protein, 14 aa, Homo sapiens
  peptide 3106
FRYRRRSRSSSRSS

SEQ ID NO: 3151 - protein, 14 aa, Homo sapiens
  peptide 3107
HFPEDTDYDHDSAE

SEQ ID NO: 3152 - protein, 14 aa, Homo sapiens
  peptide 3108
KINHFPEDTDYDHD

SEQ ID NO: 3153 - protein, 14 aa, Homo sapiens
  peptide 3109
SYRFRYRRRSRSSS

SEQ ID NO: 3154 - protein, 14 aa, Homo sapiens
  peptide 3110
CNTHESLLEVCDDY

SEQ ID NO: 3155 - protein, 14 aa, Homo sapiens
  peptide 3111
DDEDFLELPGAREE

SEQ ID NO: 3156 - protein, 14 aa, Homo sapiens
  peptide 3112
DGTLEYAPVDITVN

SEQ ID NO: 3157 - protein, 14 aa, Homo sapiens
  peptide 3113
ERPSAYEEEIEMEE

SEQ ID NO: 3158 - protein, 14 aa, Homo sapiens
  peptide 3114
HQKKEQMNEELRRE

SEQ ID NO: 3159 - protein, 14 aa, Homo sapiens
  peptide 3115
LFPFSSRERRSFTE

SEQ ID NO: 3160 - protein, 14 aa, Homo sapiens
  peptide 3116
NFKENRGSAPQTPP

SEQ ID NO: 3161 - protein, 14 aa, Homo sapiens
  peptide 3117
RERRSFTEIDTGDD

SEQ ID NO: 3162 - protein, 14 aa, Homo sapiens
  peptide 3118
SAYEEEIEMEEVVC

SEQ ID NO: 3163 - protein, 14 aa, Homo sapiens
  peptide 3119
TEIDTGDDEDFLEL

SEQ ID NO: 3164 - protein, 14 aa, Homo sapiens
  peptide 3120
CDDYNLNENEYFFD

SEQ ID NO: 3165 - protein, 14 aa, Homo sapiens
  peptide 3121
SFTSCATDFTETER

SEQ ID NO: 3166 - protein, 14 aa, Homo sapiens
  peptide 3122
SIDSFTSCATDFTE

SEQ ID NO: 3167 - protein, 14 aa, Homo sapiens
  peptide 3123
ASEEQARRLCDDYD

SEQ ID NO: 3168 - protein, 14 aa, Homo sapiens
  peptide 3124
AVRNSNHQEFEDLL

SEQ ID NO: 3169 - protein, 14 aa, Homo sapiens
  peptide 3125
FEDLLSSIDGVSEA

SEQ ID NO: 3170 - protein, 14 aa, Homo sapiens
  peptide 3126
RRLCDDYDEAAREF

SEQ ID NO: 3171 - protein, 14 aa, Homo sapiens
  peptide 3127
ARYGAARCGRLRRR

SEQ ID NO: 3172 - protein, 14 aa, Homo sapiens
  peptide 3128
ASLETSRETSQEGQ

SEQ ID NO: 3173 - protein, 14 aa, Homo sapiens
  peptide 3129
IDGVSEASLETSRE

SEQ ID NO: 3174 - protein, 14 aa, Homo sapiens
  peptide 3130
DEEEEEEGEEEEAV

SEQ ID NO: 3175 - protein, 14 aa, Homo sapiens
  peptide 3131
DLSPRIVDGIEDGN

SEQ ID NO: 3176 - protein, 14 aa, Homo sapiens
  peptide 3132
EEEEGEEEEAVSLS

SEQ ID NO: 3177 - protein, 14 aa, Homo sapiens
  peptide 3133
HQPCLHLQTGGAAY

SEQ ID NO: 3178 - protein, 14 aa, Homo sapiens
  peptide 3134
IEDGNSSEESQTFD

SEQ ID NO: 3179 - protein, 14 aa, Homo sapiens
  peptide 3135
IVEDEEEEEEGEEE

SEQ ID NO: 3180 - protein, 14 aa, Homo sapiens
  peptide 3136
LEYFQTTWSVNNGI

SEQ ID NO: 3181 - protein, 14 aa, Homo sapiens
  peptide 3137
LPSIVEDEEEEEEG

SEQ ID NO: 3182 - protein, 14 aa, Homo sapiens
  peptide 3138
MQKSCSCKFLFGVE

SEQ ID NO: 3183 - protein, 14 aa, Homo sapiens
  peptide 3139
NKRLPSIVEDEEEE

SEQ ID NO: 3184 - protein, 14 aa, Homo sapiens
  peptide 3140
NNTLGGPSIRSAYI

SEQ ID NO: 3185 - protein, 14 aa, Homo sapiens
  peptide 3141
PEYAHKFVEDIQHD

SEQ ID NO: 3186 - protein, 14 aa, Homo sapiens
  peptide 3142
PRIVDGIEDGNSSE

SEQ ID NO: 3187 - protein, 14 aa, Homo sapiens
  peptide 3143
RLLRLLQKLDRYSQ

SEQ ID NO: 3188 - protein, 14 aa, Homo sapiens
  peptide 3144
SCSCKFLFGVETNE

SEQ ID NO: 3189 - protein, 14 aa, Homo sapiens
  peptide 3145
SSLTSVGFGNVSAN

SEQ ID NO: 3190 - protein, 14 aa, Homo sapiens
  peptide 3146
VDGIEDGNSSEESQ

SEQ ID NO: 3191 - protein, 14 aa, Homo sapiens
  peptide 3147
VSRSNSPKTKQEID

SEQ ID NO: 3192 - protein, 14 aa, Homo sapiens
  peptide 3148
EEEEEEGEEEEAVS

SEQ ID NO: 3193 - protein, 14 aa, Homo sapiens
  peptide 3149
GSWNQEGMASASTK

SEQ ID NO: 3194 - protein, 14 aa, Homo sapiens
  peptide 3150
KIFSICTMLIGALM

SEQ ID NO: 3195 - protein, 14 aa, Homo sapiens
  peptide 3151
NLPGSWNQEGMASA

SEQ ID NO: 3196 - protein, 14 aa, Homo sapiens
  peptide 3152
PSIVEDEEEEEEGE

SEQ ID NO: 3197 - protein, 14 aa, Homo sapiens
  peptide 3153
SLTSVGFGNVSANT

SEQ ID NO: 3198 - protein, 14 aa, Homo sapiens
  peptide 3154
SVGFGNVSANTDAE

SEQ ID NO: 3199 - protein, 14 aa, Homo sapiens
  peptide 3155
VEDEEEEEEGEEEE

SEQ ID NO: 3200 - protein, 14 aa, Homo sapiens
  peptide 3156
ADVCGPLFEEELAF

SEQ ID NO: 3201 - protein, 14 aa, Homo sapiens
  peptide 3157
APPLSPGPGGCFEG

SEQ ID NO: 3202 - protein, 14 aa, Homo sapiens
  peptide 3158
DLAAKRLGIEDAAG

SEQ ID NO: 3203 - protein, 14 aa, Homo sapiens
  peptide 3159
PLFEEELAFWGIDE

SEQ ID NO: 3204 - protein, 14 aa, Homo sapiens
  peptide 3160
PSPPPLSPPPRAPP

SEQ ID NO: 3205 - protein, 14 aa, Homo sapiens
  peptide 3161
QYEIETDPALTYVE

SEQ ID NO: 3206 - protein, 14 aa, Homo sapiens
  peptide 3162
TPDLIGGDPGDDED

SEQ ID NO: 3207 - protein, 14 aa, Homo sapiens
  peptide 3163
LRFETRARTLGRFP

SEQ ID NO: 3208 - protein, 14 aa, Homo sapiens
  peptide 3164
YWQEFEDTCVYECL

SEQ ID NO: 3209 - protein, 14 aa, Homo sapiens
  peptide 3165
DSTDASSIEDNEDI

SEQ ID NO: 3210 - protein, 14 aa, Homo sapiens
  peptide 3166
SEFQNEDGEVDDPV

SEQ ID NO: 3211 - protein, 11 aa, Homo sapiens
  peptide 3167
CHEDWKRLARV

SEQ ID NO: 3212 - protein, 11 aa, Homo sapiens
  peptide 3168
HYCGPSVRPVP

SEQ ID NO: 3213 - protein, 14 aa, Homo sapiens
  peptide 3169
ILIMNLHYCGPSVR

SEQ ID NO: 3214 - protein, 11 aa, Homo sapiens
  peptide 3170
PELSPSPQSPE

SEQ ID NO: 3215 - protein, 11 aa, Homo sapiens
  peptide 3171
PVPAWARALLL

SEQ ID NO: 3216 - protein, 14 aa, Homo sapiens
  peptide 3172
QEALLHHVATIANT

SEQ ID NO: 3217 - protein, 11 aa, Homo sapiens
  peptide 3173
RGAAASLADFV

SEQ ID NO: 3218 - protein, 14 aa, Homo sapiens
  peptide 3174
RGEPCGQSRPPELS

SEQ ID NO: 3219 - protein, 11 aa, Homo sapiens
  peptide 3175
TLYLWIRQEWT

SEQ ID NO: 3220 - protein, 13 aa, Homo sapiens
  peptide 3176
ILIMNLHYCGPSV

SEQ ID NO: 3221 - protein, 7 aa, Homo sapiens
  peptide 3177
MDERNQV

SEQ ID NO: 3222 - protein, 13 aa, Homo sapiens
  peptide 3178
PPELSPSPQSPEG

SEQ ID NO: 3223 - protein, 13 aa, Homo sapiens
  peptide 3179
QSRPPELSPSPQS

SEQ ID NO: 3224 - protein, 13 aa, Homo sapiens
  peptide 3180
RPPELSPSPQSPE

SEQ ID NO: 3225 - protein, 13 aa, Homo sapiens
  peptide 3181
RPVPAWARALLLG

SEQ ID NO: 3226 - protein, 7 aa, Homo sapiens
  peptide 3182
RRRAAAY

SEQ ID NO: 3227 - protein, 7 aa, Homo sapiens
  peptide 3183
SPSPQSP

SEQ ID NO: 3228 - protein, 13 aa, Homo sapiens
  peptide 3184
SRPPELSPSPQSP

SEQ ID NO: 3229 - protein, 13 aa, Homo sapiens
  peptide 3185
TYGCCSEPYPDVT

SEQ ID NO: 3230 - protein, 7 aa, Homo sapiens
  peptide 3186
VRPRGAA

SEQ ID NO: 3231 - protein, 13 aa, Homo sapiens
  peptide 3187
VRPVPAWARALLL

SEQ ID NO: 3232 - protein, 7 aa, Homo sapiens
  peptide 3188
WARALLL

SEQ ID NO: 3233 - protein, 7 aa, Homo sapiens
  peptide 3189
YLWIRQE

SEQ ID NO: 3234 - protein, 14 aa, Homo sapiens
  peptide 3190
RVSSDLSRILQLLQ

SEQ ID NO: 3235 - protein, 14 aa, Homo sapiens
  peptide 3191
SNDLALVPIASETT

SEQ ID NO: 3236 - protein, 14 aa, Homo sapiens
  peptide 3192
VFTPYSAAFLLSDQ

SEQ ID NO: 3237 - protein, 14 aa, Homo sapiens
  peptide 3193
AVSRLAQALLGAEE

SEQ ID NO: 3238 - protein, 14 aa, Homo sapiens
  peptide 3194
FTPYSAAFLLSDQD

SEQ ID NO: 3239 - protein, 14 aa, Homo sapiens
  peptide 3195
KHRSSSTTEIEIIA

SEQ ID NO: 3240 - protein, 14 aa, Homo sapiens
  peptide 3196
VAILGKNDIFGEPV

SEQ ID NO: 3241 - protein, 14 aa, Homo sapiens
  peptide 3197
QSHPETLFKSIPQS

SEQ ID NO: 3242 - protein, 14 aa, Homo sapiens
  peptide 3198
VLAILPFYVSLTLT

SEQ ID NO: 3243 - protein, 14 aa, Homo sapiens
  peptide 3199
IRIMKFHVAKRKFK

SEQ ID NO: 3244 - protein, 14 aa, Homo sapiens
  peptide 3200
PFECEQTSDYQSPV

SEQ ID NO: 3245 - protein, 14 aa, Homo sapiens
  peptide 3201
AFRGASKGCLRALA

SEQ ID NO: 3246 - protein, 14 aa, Homo sapiens
  peptide 3202
DLHKIQREDLLEVL

SEQ ID NO: 3247 - protein, 14 aa, Homo sapiens
  peptide 3203
EDPDVVVIDSSKHS

SEQ ID NO: 3248 - protein, 14 aa, Homo sapiens
  peptide 3204
FNHIKSSLLGSTSD

SEQ ID NO: 3249 - protein, 14 aa, Homo sapiens
  peptide 3205
GIGKASGLDFEETV

SEQ ID NO: 3250 - protein, 14 aa, Homo sapiens
  peptide 3206
GLDFEETVPTSGRM

SEQ ID NO: 3251 - protein, 14 aa, Homo sapiens
  peptide 3207
GLHRHVSDPGLPGK

SEQ ID NO: 3252 - protein, 14 aa, Homo sapiens
  peptide 3208
GTIIRKFEGQNKKF

SEQ ID NO: 3253 - protein, 14 aa, Homo sapiens
  peptide 3209
IIAPKVKDRTHNVT

SEQ ID NO: 3254 - protein, 14 aa, Homo sapiens
  peptide 3210
KASGLDFEETVPTS

SEQ ID NO: 3255 - protein, 14 aa, Homo sapiens
  peptide 3211
LDRYSEYGAAVLML

SEQ ID NO: 3256 - protein, 14 aa, Homo sapiens
  peptide 3212
LQKQTTVVPPAYSM

SEQ ID NO: 3257 - protein, 14 aa, Homo sapiens
  peptide 3213
LQLLQKQTTVVPPA

SEQ ID NO: 3258 - protein, 14 aa, Homo sapiens
  peptide 3214
NFRTTYVNQNEEVV

SEQ ID NO: 3259 - protein, 14 aa, Homo sapiens
  peptide 3215
QTTVVPPAYSMVTA

SEQ ID NO: 3260 - protein, 14 aa, Homo sapiens
  peptide 3216
REDLLEVLDMYPEF

SEQ ID NO: 3261 - protein, 14 aa, Homo sapiens
  peptide 3217
RRASSVHDIEGFGV

SEQ ID NO: 3262 - protein, 14 aa, Homo sapiens
  peptide 3218
SSSFISSIDDEQKP

SEQ ID NO: 3263 - protein, 14 aa, Homo sapiens
  peptide 3219
VNISGPLDHSSPKR

SEQ ID NO: 3264 - protein, 14 aa, Homo sapiens
  peptide 3220
VVPPAYSMVTAGSE

SEQ ID NO: 3265 - protein, 14 aa, Homo sapiens
  peptide 3221
YCNDGFCEMTGFSR

SEQ ID NO: 3266 - protein, 14 aa, Homo sapiens
  peptide 3222
GISETESDLTYGEV

SEQ ID NO: 3267 - protein, 14 aa, Homo sapiens
  peptide 3223
KKNSSPPSSDKTII

SEQ ID NO: 3268 - protein, 14 aa, Homo sapiens
  peptide 3224
KSRSSSFISSIDDE

SEQ ID NO: 3269 - protein, 14 aa, Homo sapiens
  peptide 3225
IAQIAQALLGSEER

SEQ ID NO: 3270 - protein, 14 aa, Homo sapiens
  peptide 3226
QEQLNRLESQMTTD

SEQ ID NO: 3271 - protein, 14 aa, Homo sapiens
  peptide 3227
EENFKQIYSQFFPQ

SEQ ID NO: 3272 - protein, 14 aa, Homo sapiens
  peptide 3228
GRKESLSDSRDLDG

SEQ ID NO: 3273 - protein, 14 aa, Homo sapiens
  peptide 3229
SLSGVLVIALPVPV

SEQ ID NO: 3274 - protein, 14 aa, Homo sapiens
  peptide 3230
LGYTLKSCASELGF

SEQ ID NO: 3275 - protein, 14 aa, Homo sapiens
  peptide 3231
SLLSSCCPRRAKRR

SEQ ID NO: 3276 - protein, 11 aa, Homo sapiens
  peptide 3232
ARTCGASRPGP

SEQ ID NO: 3277 - protein, 11 aa, Homo sapiens
  peptide 3233
DAELDDPESED

SEQ ID NO: 3278 - protein, 11 aa, Homo sapiens
  peptide 3234
DALLRPLELEN

SEQ ID NO: 3279 - protein, 11 aa, Homo sapiens
  peptide 3235
DDDYVNVASFN

SEQ ID NO: 3280 - protein, 11 aa, Homo sapiens
  peptide 3236
DMVIIVDVSGS

SEQ ID NO: 3281 - protein, 14 aa, Homo sapiens
  peptide 3237
EDVERGSKASTLRL

SEQ ID NO: 3282 - protein, 11 aa, Homo sapiens
  peptide 3238
ELDDPESEDVE

SEQ ID NO: 3283 - protein, 11 aa, Homo sapiens
  peptide 3239
FEKYNWPNRTV

SEQ ID NO: 3284 - protein, 11 aa, Homo sapiens
  peptide 3240
HAQRLTNTNLL

SEQ ID NO: 3285 - protein, 11 aa, Homo sapiens
  peptide 3241
HQDALLRPLEL

SEQ ID NO: 3286 - protein, 11 aa, Homo sapiens
  peptide 3242
KADAELDDPES

SEQ ID NO: 3287 - protein, 14 aa, Homo sapiens
  peptide 3243
KAHRWQDNIKEEDI

SEQ ID NO: 3288 - protein, 11 aa, Homo sapiens
  peptide 3244
LGANGYVFAID

SEQ ID NO: 3289 - protein, 14 aa, Homo sapiens
  peptide 3245
PTVADFLNLAWWTS

SEQ ID NO: 3290 - protein, 14 aa, Homo sapiens
  peptide 3246
QIPTDIYKGSTVIL

SEQ ID NO: 3291 - protein, 14 aa, Homo sapiens
  peptide 3247
RWQDNIKEEDIVYY

SEQ ID NO: 3292 - protein, 14 aa, Homo sapiens
  peptide 3248
SSPKDMVIIVDVSG

SEQ ID NO: 3293 - protein, 11 aa, Homo sapiens
  peptide 3249
TCGASRPGPAR

SEQ ID NO: 3294 - protein, 11 aa, Homo sapiens
  peptide 3250
WARRLEQEVDG

SEQ ID NO: 3295 - protein, 11 aa, Homo sapiens
  peptide 3251
YRRGPHICFDY

SEQ ID NO: 3296 - protein, 11 aa, Homo sapiens
  peptide 3252
YVFKPPHQDAL

SEQ ID NO: 3297 - protein, 14 aa, Homo sapiens
  peptide 3253
YVNVASFNEKAQPV

SEQ ID NO: 3298 - protein, 14 aa, Homo sapiens
  peptide 3254
CKDLNASDNNTEFL

SEQ ID NO: 3299 - protein, 14 aa, Homo sapiens
  peptide 3255
TLVKSLDERYIDEV

SEQ ID NO: 3300 - protein, 14 aa, Homo sapiens
  peptide 3256
LEDLQDLDSLDTEK

SEQ ID NO: 3301 - protein, 14 aa, Homo sapiens
  peptide 3257
DTLLGSSERDFFYH

SEQ ID NO: 3302 - protein, 14 aa, Homo sapiens
  peptide 3258
EQVFEESCMEVATV

SEQ ID NO: 3303 - protein, 14 aa, Homo sapiens
  peptide 3259
ETQQYFFDRDPDIF

SEQ ID NO: 3304 - protein, 14 aa, Homo sapiens
  peptide 3260
FEESCMEVATVNRP

SEQ ID NO: 3305 - protein, 14 aa, Homo sapiens
  peptide 3261
HECISAYDEELAFF

SEQ ID NO: 3306 - protein, 14 aa, Homo sapiens
  peptide 3262
KTTNHEFVDEQVFE

SEQ ID NO: 3307 - protein, 14 aa, Homo sapiens
  peptide 3263
NHEFVDEQVFEESC

SEQ ID NO: 3308 - protein, 14 aa, Homo sapiens
  peptide 3264
PFARAAAIGWMPVA

SEQ ID NO: 3309 - protein, 14 aa, Homo sapiens
  peptide 3265
YHPETQQYFFDRDP

SEQ ID NO: 3310 - protein, 14 aa, Homo sapiens
  peptide 3266
YPRHECISAYDEEL

SEQ ID NO: 3311 - protein, 14 aa, Homo sapiens
  peptide 3267
YVTTAIISIPTPPV

SEQ ID NO: 3312 - protein, 14 aa, Homo sapiens
  peptide 3268
KRRAQKKARLARIR

SEQ ID NO: 3313 - protein, 14 aa, Homo sapiens
  peptide 3269
LDTACVMIFTVEYL

SEQ ID NO: 3314 - protein, 14 aa, Homo sapiens
  peptide 3270
LVMTDNEDVSGAFV

SEQ ID NO: 3315 - protein, 14 aa, Homo sapiens
  peptide 3271
YIGLVMTDNEDVSG

SEQ ID NO: 3316 - protein, 11 aa, Homo sapiens
  peptide 3272
AGGGGAGSEHS

SEQ ID NO: 3317 - protein, 11 aa, Homo sapiens
  peptide 3273
ANYRWVHHKYN

SEQ ID NO: 3318 - protein, 14 aa, Homo sapiens
  peptide 3274
DATPHTLVQPIPAT

SEQ ID NO: 3319 - protein, 11 aa, Homo sapiens
  peptide 3275
DEEEIDYTLCF

SEQ ID NO: 3320 - protein, 14 aa, Homo sapiens
  peptide 3276
DEGRHLGSRHCQTL

SEQ ID NO: 3321 - protein, 14 aa, Homo sapiens
  peptide 3277
DNRDSVDLAELVPA

SEQ ID NO: 3322 - protein, 14 aa, Homo sapiens
  peptide 3278
DRGDRGEDEEEIDY

SEQ ID NO: 3323 - protein, 14 aa, Homo sapiens
  peptide 3279
DRGEDEEEIDYTLC

SEQ ID NO: 3324 - protein, 11 aa, Homo sapiens
  peptide 3280
DSSQAPPSPFS

SEQ ID NO: 3325 - protein, 14 aa, Homo sapiens
  peptide 3281
DVYKPDWCEVREDW

SEQ ID NO: 3326 - protein, 11 aa, Homo sapiens
  peptide 3282
ECCLSKDDVYD

SEQ ID NO: 3327 - protein, 14 aa, Homo sapiens
  peptide 3283
EDGASSELGKEEEE

SEQ ID NO: 3328 - protein, 11 aa, Homo sapiens
  peptide 3284
EDQSSSNIEEF

SEQ ID NO: 3329 - protein, 11 aa, Homo sapiens
  peptide 3285
EEEEEEQADGA

SEQ ID NO: 3330 - protein, 14 aa, Homo sapiens
  peptide 3286
FNPVRSWLKHDSSQ

SEQ ID NO: 3331 - protein, 14 aa, Homo sapiens
  peptide 3287
GAGGGGAGSEHSET

SEQ ID NO: 3332 - protein, 11 aa, Homo sapiens
  peptide 3288
GASSELGKEEE

SEQ ID NO: 3333 - protein, 11 aa, Homo sapiens
  peptide 3289
GEDEEEIDYTL

SEQ ID NO: 3334 - protein, 11 aa, Homo sapiens
  peptide 3290
GKEEEEEEQAD

SEQ ID NO: 3335 - protein, 14 aa, Homo sapiens
  peptide 3291
GKFYHCLGVDTRNI

SEQ ID NO: 3336 - protein, 14 aa, Homo sapiens
  peptide 3292
GSLQTTLEDSLTLS

SEQ ID NO: 3337 - protein, 11 aa, Homo sapiens
  peptide 3293
GSSAGGEDEAD

SEQ ID NO: 3338 - protein, 11 aa, Homo sapiens
  peptide 3294
KDPPGRAPLPM

SEQ ID NO: 3339 - protein, 14 aa, Homo sapiens
  peptide 3295
KEAQEDAEMDAELE

SEQ ID NO: 3340 - protein, 14 aa, Homo sapiens
  peptide 3296
KFSLRTDTGDTVPD

SEQ ID NO: 3341 - protein, 14 aa, Homo sapiens
  peptide 3297
KMGDRGDRGEDEEE

SEQ ID NO: 3342 - protein, 11 aa, Homo sapiens
  peptide 3298
LDAVAVDQQPV

SEQ ID NO: 3343 - protein, 14 aa, Homo sapiens
  peptide 3299
LDSSGDPKLCPIPM

SEQ ID NO: 3344 - protein, 11 aa, Homo sapiens
  peptide 3300
LEGELTIIDNL

SEQ ID NO: 3345 - protein, 14 aa, Homo sapiens
  peptide 3301
LERPQIEAGSTERI

SEQ ID NO: 3346 - protein, 11 aa, Homo sapiens
  peptide 3302
LTSLFCPPPPP

SEQ ID NO: 3347 - protein, 11 aa, Homo sapiens
  peptide 3303
LVALGSRKSSV

SEQ ID NO: 3348 - protein, 11 aa, Homo sapiens
  peptide 3304
MKHLDDSNKEA

SEQ ID NO: 3349 - protein, 14 aa, Homo sapiens
  peptide 3305
MRVGDLGECFFPLS

SEQ ID NO: 3350 - protein, 11 aa, Homo sapiens
  peptide 3306
NFLCEMEEIPF

SEQ ID NO: 3351 - protein, 14 aa, Homo sapiens
  peptide 3307
PAPGHEDCNGRMPS

SEQ ID NO: 3352 - protein, 14 aa, Homo sapiens
  peptide 3308
PDASSPLLPMPAEF

SEQ ID NO: 3353 - protein, 11 aa, Homo sapiens
  peptide 3309
PENFLCEMEEI

SEQ ID NO: 3354 - protein, 11 aa, Homo sapiens
  peptide 3310
PGLEEPLDGAD

SEQ ID NO: 3355 - protein, 11 aa, Homo sapiens
  peptide 3311
PRRALGPPAPA

SEQ ID NO: 3356 - protein, 11 aa, Homo sapiens
  peptide 3312
PSPFSPDASSP

SEQ ID NO: 3357 - protein, 14 aa, Homo sapiens
  peptide 3313
QEDAEMDAELELEM

SEQ ID NO: 3358 - protein, 11 aa, Homo sapiens
  peptide 3314
RGLRAHQRSHS

SEQ ID NO: 3359 - protein, 11 aa, Homo sapiens
  peptide 3315
RGPGGAGGGGD

SEQ ID NO: 3360 - protein, 11 aa, Homo sapiens
  peptide 3316
RILVNLLLDTL

SEQ ID NO: 3361 - protein, 11 aa, Homo sapiens
  peptide 3317
RSAAWASRRSS

SEQ ID NO: 3362 - protein, 11 aa, Homo sapiens
  peptide 3318
SAERGGGARVC

SEQ ID NO: 3363 - protein, 11 aa, Homo sapiens
  peptide 3319
SDRSSSILLGD

SEQ ID NO: 3364 - protein, 14 aa, Homo sapiens
  peptide 3320
SGDPKLCPIPMTPN

SEQ ID NO: 3365 - protein, 11 aa, Homo sapiens
  peptide 3321
SLFCPPPPPPA

SEQ ID NO: 3366 - protein, 14 aa, Homo sapiens
  peptide 3322
SLTSLFCPPPPPPA

SEQ ID NO: 3367 - protein, 11 aa, Homo sapiens
  peptide 3323
SPDASSPLLPM

SEQ ID NO: 3368 - protein, 11 aa, Homo sapiens
  peptide 3324
SSELGKEEEEE

SEQ ID NO: 3369 - protein, 11 aa, Homo sapiens
  peptide 3325
SSPLLPMPAEF

SEQ ID NO: 3370 - protein, 11 aa, Homo sapiens
  peptide 3326
TPHTLVQPIPA

SEQ ID NO: 3371 - protein, 14 aa, Homo sapiens
  peptide 3327
TVASYAEPGDCYEE

SEQ ID NO: 3372 - protein, 14 aa, Homo sapiens
  peptide 3328
VIFQVITLEGWVEI

SEQ ID NO: 3373 - protein, 14 aa, Homo sapiens
  peptide 3329
VTLGMYQPCDDMDC

SEQ ID NO: 3374 - protein, 11 aa, Homo sapiens
  peptide 3330
VYDFGAGRQDL

SEQ ID NO: 3375 - protein, 14 aa, Homo sapiens
  peptide 3331
YNGLDAVAVDQQPV

SEQ ID NO: 3376 - protein, 14 aa, Homo sapiens
  peptide 3332
ASSELGKEEEEEEQ

SEQ ID NO: 3377 - protein, 14 aa, Homo sapiens
  peptide 3333
LNSDRSSSILLGDD

SEQ ID NO: 3378 - protein, 14 aa, Homo sapiens
  peptide 3334
SYSDEDQSSSNIEE

SEQ ID NO: 3379 - protein, 14 aa, Homo sapiens
  peptide 3335
AFSLNSDRSSSILL

SEQ ID NO: 3380 - protein, 14 aa, Homo sapiens
  peptide 3336
DNLSGSIFHHYSSP

SEQ ID NO: 3381 - protein, 14 aa, Homo sapiens
  peptide 3337
DRSSSILLGDDLSL

SEQ ID NO: 3382 - protein, 14 aa, Homo sapiens
  peptide 3338
HDKQEVQLAETEAF

SEQ ID NO: 3383 - protein, 14 aa, Homo sapiens
  peptide 3339
MHIFGCKFSLRTDT

SEQ ID NO: 3384 - protein, 14 aa, Homo sapiens
  peptide 3340
SGSIFHHYSSPAGC

SEQ ID NO: 3385 - protein, 11 aa, Homo sapiens
  peptide 3341
AHICNGTNLTM

SEQ ID NO: 3386 - protein, 14 aa, Homo sapiens
  peptide 3342
FGALSFIVAETVGV

SEQ ID NO: 3387 - protein, 11 aa, Homo sapiens
  peptide 3343
GHCFRINHFPE

SEQ ID NO: 3388 - protein, 11 aa, Homo sapiens
  peptide 3344
LTTAGAFAAFS

SEQ ID NO: 3389 - protein, 14 aa, Homo sapiens
  peptide 3345
LYSSAHICNGTNLT

SEQ ID NO: 3390 - protein, 11 aa, Homo sapiens
  peptide 3346
NHFPEDNDYDH

SEQ ID NO: 3391 - protein, 11 aa, Homo sapiens
  peptide 3347
PSRDVSPMGLK

SEQ ID NO: 3392 - protein, 11 aa, Homo sapiens
  peptide 3348
RMPSYRYRRRR

SEQ ID NO: 3393 - protein, 11 aa, Homo sapiens
  peptide 3349
VAETVGVLAVN

SEQ ID NO: 3394 - protein, 11 aa, Homo sapiens
  peptide 3350
YWLYSSAHICN

SEQ ID NO: 3395 - protein, 14 aa, Homo sapiens
  peptide 3351
EDNDYDHDSSEYLL

SEQ ID NO: 3396 - protein, 14 aa, Homo sapiens
  peptide 3352
HFPEDNDYDHDSSE

SEQ ID NO: 3397 - protein, 14 aa, Homo sapiens
  peptide 3353
RINHFPEDNDYDHD

SEQ ID NO: 3398 - protein, 14 aa, Homo sapiens
  peptide 3354
SYRYRRRRSRSSSR

SEQ ID NO: 3399 - protein, 14 aa, Homo sapiens
  peptide 3355
SFAFAAISFLLTES

SEQ ID NO: 3400 - protein, 14 aa, Homo sapiens
  peptide 3356
SSEASLQMNSNYPA

SEQ ID NO: 3401 - protein, 11 aa, Homo sapiens
  peptide 3357
AYLTWDRDQYD

SEQ ID NO: 3402 - protein, 11 aa, Homo sapiens
  peptide 3358
CLSPHHSRERD

SEQ ID NO: 3403 - protein, 11 aa, Homo sapiens
  peptide 3359
DFIEDVEWEVH

SEQ ID NO: 3404 - protein, 14 aa, Homo sapiens
  peptide 3360
DFIEDVEWEVHGMP

SEQ ID NO: 3405 - protein, 11 aa, Homo sapiens
  peptide 3361
DIVLYNKADDE

SEQ ID NO: 3406 - protein, 14 aa, Homo sapiens
  peptide 3362
DLSDFIEDVEWEVH

SEQ ID NO: 3407 - protein, 11 aa, Homo sapiens
  peptide 3363
DLVWRPDIVLY

SEQ ID NO: 3408 - protein, 11 aa, Homo sapiens
  peptide 3364
DSGDLSDFIED

SEQ ID NO: 3409 - protein, 14 aa, Homo sapiens
  peptide 3365
DSGDLSDFIEDVEW

SEQ ID NO: 3410 - protein, 14 aa, Homo sapiens
  peptide 3366
EDYSNALRPVEDTD

SEQ ID NO: 3411 - protein, 11 aa, Homo sapiens
  peptide 3367
FQLMVAEIMPA

SEQ ID NO: 3412 - protein, 11 aa, Homo sapiens
  peptide 3368
GDLSDFIEDVE

SEQ ID NO: 3413 - protein, 14 aa, Homo sapiens
  peptide 3369
IATMALITASTALT

SEQ ID NO: 3414 - protein, 14 aa, Homo sapiens
  peptide 3370
LTKVYSKLPESNLK

SEQ ID NO: 3415 - protein, 11 aa, Homo sapiens
  peptide 3371
PAITKSSCVVD

SEQ ID NO: 3416 - protein, 11 aa, Homo sapiens
  peptide 3372
PHWARVVILKY

SEQ ID NO: 3417 - protein, 11 aa, Homo sapiens
  peptide 3373
QKLFNDLFEDY

SEQ ID NO: 3418 - protein, 14 aa, Homo sapiens
  peptide 3374
RDHLTKVYSKLPES

SEQ ID NO: 3419 - protein, 14 aa, Homo sapiens
  peptide 3375
TVFQLMVAEIMPAS

SEQ ID NO: 3420 - protein, 14 aa, Homo sapiens
  peptide 3376
VHGMPAVKNVISYG

SEQ ID NO: 3421 - protein, 11 aa, Homo sapiens
  peptide 3377
VLRYDGLITWD

SEQ ID NO: 3422 - protein, 11 aa, Homo sapiens
  peptide 3378
VVDVTYFPFDN

SEQ ID NO: 3423 - protein, 7 aa, Homo sapiens
  peptide 3379
AITKSSC

SEQ ID NO: 3424 - protein, 7 aa, Homo sapiens
  peptide 3380
DFIEDVE

SEQ ID NO: 3425 - protein, 13 aa, Homo sapiens
  peptide 3381
DLSDFIEDVEWEV

SEQ ID NO: 3426 - protein, 13 aa, Homo sapiens
  peptide 3382
DSGDLSDFIEDVE

SEQ ID NO: 3427 - protein, 7 aa, Homo sapiens
  peptide 3383
GAEARPV

SEQ ID NO: 3428 - protein, 13 aa, Homo sapiens
  peptide 3384
GDLSDFIEDVEWE

SEQ ID NO: 3429 - protein, 13 aa, Homo sapiens
  peptide 3385
LTFGSWTYNGNQV

SEQ ID NO: 3430 - protein, 13 aa, Homo sapiens
  peptide 3386
LYNKADDESSEPV

SEQ ID NO: 3431 - protein, 7 aa, Homo sapiens
  peptide 3387
SFLAPLS

SEQ ID NO: 3432 - protein, 13 aa, Homo sapiens
  peptide 3388
SGDLSDFIEDVEW

SEQ ID NO: 3433 - protein, 7 aa, Homo sapiens
  peptide 3389
YNGNQVD

SEQ ID NO: 3434 - protein, 14 aa, Homo sapiens
  peptide 3390
ASMDQISAITDSAE

SEQ ID NO: 3435 - protein, 14 aa, Homo sapiens
  peptide 3391
DQISAITDSAEYCE

SEQ ID NO: 3436 - protein, 14 aa, Homo sapiens
  peptide 3392
HTSVMTGSLLDDHH

SEQ ID NO: 3437 - protein, 14 aa, Homo sapiens
  peptide 3393
IYGHTSVMTGSLLD

SEQ ID NO: 3438 - protein, 14 aa, Homo sapiens
  peptide 3394
LPYRFRNKKMKTLK

SEQ ID NO: 3439 - protein, 14 aa, Homo sapiens
  peptide 3395
MQAAPRAGCGAALL

SEQ ID NO: 3440 - protein, 14 aa, Homo sapiens
  peptide 3396
NGVNRNSAIIGGVI

SEQ ID NO: 3441 - protein, 14 aa, Homo sapiens
  peptide 3397
SSRVDNAPDQQNSH

SEQ ID NO: 3442 - protein, 14 aa, Homo sapiens
  peptide 3398
VDNAPDQQNSHPDL

SEQ ID NO: 3443 - protein, 14 aa, Homo sapiens
  peptide 3399
VYSASMDQISAITD

SEQ ID NO: 3444 - protein, 14 aa, Homo sapiens
  peptide 3400
CDDYDVTCNEFFFD

SEQ ID NO: 3445 - protein, 14 aa, Homo sapiens
  peptide 3401
DASFHPAFLPQRQA

SEQ ID NO: 3446 - protein, 14 aa, Homo sapiens
  peptide 3402
EEFAEMVEREEEDD

SEQ ID NO: 3447 - protein, 14 aa, Homo sapiens
  peptide 3403
LLPGDNSDYDYSAL

SEQ ID NO: 3448 - protein, 14 aa, Homo sapiens
  peptide 3404
LLREMCALSFQEEL

SEQ ID NO: 3449 - protein, 14 aa, Homo sapiens
  peptide 3405
LNVCDDYDVTCNEF

SEQ ID NO: 3450 - protein, 14 aa, Homo sapiens
  peptide 3406
MVERPHSGLPGKVF

SEQ ID NO: 3451 - protein, 14 aa, Homo sapiens
  peptide 3407
NLSVSTLPSLREEE

SEQ ID NO: 3452 - protein, 14 aa, Homo sapiens
  peptide 3408
TNFDDILNVCDDYD

SEQ ID NO: 3453 - protein, 14 aa, Homo sapiens
  peptide 3409
TPGQVVALSSILSG

SEQ ID NO: 3454 - protein, 14 aa, Homo sapiens
  peptide 3410
EEEEQGHCSQMCHN

SEQ ID NO: 3455 - protein, 14 aa, Homo sapiens
  peptide 3411
EFPLTRLGQLKACT

SEQ ID NO: 3456 - protein, 14 aa, Homo sapiens
  peptide 3412
MVEREEEDDALDSE

SEQ ID NO: 3457 - protein, 14 aa, Homo sapiens
  peptide 3413
RVMFRRAQFLIKTK

SEQ ID NO: 3458 - protein, 14 aa, Homo sapiens
  peptide 3414
DDYDVSRDEFFFDR

SEQ ID NO: 3459 - protein, 14 aa, Homo sapiens
  peptide 3415
ECSPKCRSLFVLET

SEQ ID NO: 3460 - protein, 14 aa, Homo sapiens
  peptide 3416
GHDDLLRVCDDYDV

SEQ ID NO: 3461 - protein, 14 aa, Homo sapiens
  peptide 3417
HSATATEDSSQGPD

SEQ ID NO: 3462 - protein, 14 aa, Homo sapiens
  peptide 3418
PLARLERLRACRGH

SEQ ID NO: 3463 - protein, 14 aa, Homo sapiens
  peptide 3419
TERGAQGSPARALG

SEQ ID NO: 3464 - protein, 14 aa, Homo sapiens
  peptide 3420
LLLFLCVAMALFAP

SEQ ID NO: 3465 - protein, 14 aa, Homo sapiens
  peptide 3421
RALGPRGRLQRGRR

SEQ ID NO: 3466 - protein, 14 aa, Homo sapiens
  peptide 3422
RRCAREFGLLLLFL

SEQ ID NO: 3467 - protein, 14 aa, Homo sapiens
  peptide 3423
VCDDYDVSRDEFFF

SEQ ID NO: 3468 - protein, 14 aa, Homo sapiens
  peptide 3424
ASTSGLLQPLCVDT

SEQ ID NO: 3469 - protein, 14 aa, Homo sapiens
  peptide 3425
FDLLHAFKVNVYFG

SEQ ID NO: 3470 - protein, 14 aa, Homo sapiens
  peptide 3426
FWCLLDVIPIKNEK

SEQ ID NO: 3471 - protein, 14 aa, Homo sapiens
  peptide 3427
GIEDGCGSDQPKFS

SEQ ID NO: 3472 - protein, 14 aa, Homo sapiens
  peptide 3428
NTLMSTLEEKETDG

SEQ ID NO: 3473 - protein, 14 aa, Homo sapiens
  peptide 3429
PRRTAPRPRLGGRG

SEQ ID NO: 3474 - protein, 14 aa, Homo sapiens
  peptide 3430
RRRYGRARSKGFNA

SEQ ID NO: 3475 - protein, 14 aa, Homo sapiens
  peptide 3431
RTTFVSKSGQVVFA

SEQ ID NO: 3476 - protein, 14 aa, Homo sapiens
  peptide 3432
TVSPAPADEPSSPL

SEQ ID NO: 3477 - protein, 14 aa, Homo sapiens
  peptide 3433
TWAVNNGIDTTELL

SEQ ID NO: 3478 - protein, 14 aa, Homo sapiens
  peptide 3434
VCDLAVEVLFILDI

SEQ ID NO: 3479 - protein, 14 aa, Homo sapiens
  peptide 3435
VVDGIEDGCGSDQP

SEQ ID NO: 3480 - protein, 14 aa, Homo sapiens
  peptide 3436
YITSLYFALSSLTS

SEQ ID NO: 3481 - protein, 14 aa, Homo sapiens
  peptide 3437
LLDVIPIKNEKGEV

SEQ ID NO: 3482 - protein, 14 aa, Homo sapiens
  peptide 3438
DLCSEPSTPASPPP

SEQ ID NO: 3483 - protein, 14 aa, Homo sapiens
  peptide 3439
KHKLNKGVFGEKPN

SEQ ID NO: 3484 - protein, 14 aa, Homo sapiens
  peptide 3440
LNFRTTFVSKSGQV

SEQ ID NO: 3485 - protein, 14 aa, Homo sapiens
  peptide 3441
ATVSMTTVGYGDVV

SEQ ID NO: 3486 - protein, 14 aa, Homo sapiens
  peptide 3442
AYTIEKEENEGLAT

SEQ ID NO: 3487 - protein, 14 aa, Homo sapiens
  peptide 3443
FQIPDSQGNPGEDP

SEQ ID NO: 3488 - protein, 14 aa, Homo sapiens
  peptide 3444
GNFRRQLWLALDNP

SEQ ID NO: 3489 - protein, 14 aa, Homo sapiens
  peptide 3445
HSREAILELCDDYD

SEQ ID NO: 3490 - protein, 14 aa, Homo sapiens
  peptide 3446
STTSSFDEILAFYN

SEQ ID NO: 3491 - protein, 14 aa, Homo sapiens
  peptide 3447
VFSFSQEIEYWGIN

SEQ ID NO: 3492 - protein, 14 aa, Homo sapiens
  peptide 3448
CDDYDDVQREFYFD

SEQ ID NO: 3493 - protein, 14 aa, Homo sapiens
  peptide 3449
LELCDDYDDVQREF

SEQ ID NO: 3494 - protein, 14 aa, Homo sapiens
  peptide 3450
ACSLDLHKFPMDKQ

SEQ ID NO: 3495 - protein, 14 aa, Homo sapiens
  peptide 3451
AQAPLASPESLGSL

SEQ ID NO: 3496 - protein, 14 aa, Homo sapiens
  peptide 3452
FYSRGPRRQPRRHR

SEQ ID NO: 3497 - protein, 14 aa, Homo sapiens
  peptide 3453
ILVCLFFVFLSLLE

SEQ ID NO: 3498 - protein, 14 aa, Homo sapiens
  peptide 3454
KCDTNSTWGLNDDE

SEQ ID NO: 3499 - protein, 14 aa, Homo sapiens
  peptide 3455
RGPRRQPRRHRRPR

SEQ ID NO: 3500 - protein, 14 aa, Homo sapiens
  peptide 3456
PRRQPRRHRRPRRV

SEQ ID NO: 3501 - protein, 14 aa, Homo sapiens
  peptide 3457
QREVNSYLVQVYWP

SEQ ID NO: 3502 - protein, 14 aa, Homo sapiens
  peptide 3458
CIWYVIGRREMEAN

SEQ ID NO: 3503 - protein, 14 aa, Homo sapiens
  peptide 3459
EICFYRKDGSAFWC

SEQ ID NO: 3504 - protein, 14 aa, Homo sapiens
  peptide 3460
ELRHIMGLLQARLG

SEQ ID NO: 3505 - protein, 14 aa, Homo sapiens
  peptide 3461
HKALEGHQEHRAEI

SEQ ID NO: 3506 - protein, 14 aa, Homo sapiens
  peptide 3462
KTLPSITEAESGAE

SEQ ID NO: 3507 - protein, 14 aa, Homo sapiens
  peptide 3463
LEGHQEHRAEICFY

SEQ ID NO: 3508 - protein, 14 aa, Homo sapiens
  peptide 3464
LPRPLKQRMLEYFQ

SEQ ID NO: 3509 - protein, 14 aa, Homo sapiens
  peptide 3465
NLRQGSDTSGLSRF

SEQ ID NO: 3510 - protein, 14 aa, Homo sapiens
  peptide 3466
PSITEAESGAEPGG

SEQ ID NO: 3511 - protein, 14 aa, Homo sapiens
  peptide 3467
REILQLPLFGAASR

SEQ ID NO: 3512 - protein, 14 aa, Homo sapiens
  peptide 3468
RPSPELASEAEEVK

SEQ ID NO: 3513 - protein, 14 aa, Homo sapiens
  peptide 3469
VDGIEDSGSTAEAP

SEQ ID NO: 3514 - protein, 14 aa, Homo sapiens
  peptide 3470
VHRLPRPLKQRMLE

SEQ ID NO: 3515 - protein, 14 aa, Homo sapiens
  peptide 3471
GDALQAHYYVCSGS

SEQ ID NO: 3516 - protein, 14 aa, Homo sapiens
  peptide 3472
LPSITEAESGAEPG

SEQ ID NO: 3517 - protein, 14 aa, Homo sapiens
  peptide 3473
PYNVCFSGDDDTPI

SEQ ID NO: 3518 - protein, 14 aa, Homo sapiens
  peptide 3474
SDIAVEMLFILDII

SEQ ID NO: 3519 - protein, 14 aa, Homo sapiens
  peptide 3475
SQPRSESLGSSSDK

SEQ ID NO: 3520 - protein, 14 aa, Homo sapiens
  peptide 3476
GSDSSDSELELSTV

SEQ ID NO: 3521 - protein, 14 aa, Homo sapiens
  peptide 3477
SSTAPQGSDSSDSE

SEQ ID NO: 3522 - protein, 11 aa, Homo sapiens
  peptide 3478
ASPVGIKGFNT

SEQ ID NO: 3523 - protein, 11 aa, Homo sapiens
  peptide 3479
FYFGALSFIIA

SEQ ID NO: 3524 - protein, 11 aa, Homo sapiens
  peptide 3480
GIKGFNTLPST

SEQ ID NO: 3525 - protein, 14 aa, Homo sapiens
  peptide 3481
KGFNTLPSTEISMY

SEQ ID NO: 3526 - protein, 14 aa, Homo sapiens
  peptide 3482
LLFMGGLCIAASEF

SEQ ID NO: 3527 - protein, 14 aa, Homo sapiens
  peptide 3483
PEDADYEADTAEYF

SEQ ID NO: 3528 - protein, 14 aa, Homo sapiens
  peptide 3484
RIPSYRYRYQRRSR

SEQ ID NO: 3529 - protein, 11 aa, Homo sapiens
  peptide 3485
SLHSNTANRRT

SEQ ID NO: 3530 - protein, 11 aa, Homo sapiens
  peptide 3486
VHMFIDRHKQL

SEQ ID NO: 3531 - protein, 14 aa, Homo sapiens
  peptide 3487
VLAVHMFIDRHKQL

SEQ ID NO: 3532 - protein, 14 aa, Homo sapiens
  peptide 3488
WLYSRGVCKTKSVS

SEQ ID NO: 3533 - protein, 14 aa, Homo sapiens
  peptide 3489
IKGFNTLPSTEISM

SEQ ID NO: 3534 - protein, 14 aa, Homo sapiens
  peptide 3490
LLTTVGAFAAFSLM

SEQ ID NO: 3535 - protein, 14 aa, Homo sapiens
  peptide 3491
PVGIKGFNTLPSTE

SEQ ID NO: 3536 - protein, 14 aa, Homo sapiens
  peptide 3492
SFYFGALSFIIAEM
